United States Patent Application Publication US 2015/0307562 A1 - sequence listing, part 3

SEQ ID NO: 19699 - protein, 351 aa, Escherichia coli
MKKSTLALVVMGIVASASVQAAEIYNKDGNKLDVYGKVKAMHYMSDNDSKDGDQSYIRFGFKGETQINDQLTGYGRWEAEFAGNKAESDTAQQKTRLAFAGLKYKDLGSFDYGRNLGALYDVEAWTDMFPEFGGDSSAQTDNFMTKRASGLATYRNTDFFGVIDGLNLTLQYQGKNENRDVKKQNGDGFGTSLIYDFGGSDFAISGAYTNSDRTNEQNLQSRGTGKRAEAWATGLKYDANNIYLATFYSETRKMTPITGGFANKTQNFEAVAQYQFDFGLRPSLGYVLSKGKDIEGIGDEDLVNYIDVGATYYFNKNMSAFVDYKINQLDSDNKLNINNDDIVAVGMTYQF

SEQ ID NO: 19700 - protein, 376 aa, Escherichia coli
MKVKVLSLLVPALLVAGAANAAEVYNKDGNKLDLYGKVDGLHYFSDNKSEDGDQTYVRLGFKGETQVTDQLTGYGQWEYQIQGNTSEDNKENSWTRVAFAGLKFQDVGSFDYGRNYGVVYDVTSWTDVLPEFGGDTYGSDNFMQQRGNGFATYRNTDFFGLVDGLNFAVQYQGKNGSVSGEGMTNNGRGALRQNGDGVGGSITYDYEGFGIGAAVSSSKRTDDQNGSYTSNGVVRNYIGTGDRAETYTGGLKYDANNIYLAAQYTQTYNATRVGSLGWANKAQNFEAVAQYQFDFGLRPSLAYLQSKGKNLGVINSRNYDDEDILKYVDVGATYYFNKNMSTYVDYKINLLDDNQFTRDAGINTDNIVALGLVYQF

SEQ ID NO: 19701 - protein, 250 aa, Escherichia coli; identical to SEQ ID NO: 5817

SEQ ID NO: 19702 - protein, 832 aa, Escherichia coli
MYKKLKLTTISELIKNIYCSLSVIIIGCASAYAVEFNKDLIEAEDRENVNLSQFETDGQLPVGKYSLSTLINNKRTPIHLDLQWVLIDNLTAVCVTPEQLTLLGFTDEIIEEAQQNLIDGCYPIEKEKQITTYLDKGKMQLSISAPQAWLKYKDANWTPPELWDHGIAGAFLDYNLYASHYAPHQGDNSQNISSYGQAGVNLGAWRLRTDYQYDQSFNNGKSQANNLDFPRIYLFRPIPAINAKLTIGQYDTESSIFDSFHFSGVSLKSDENMLPPDLRGYAPQITGVAQTNAKVTVSQNNRIIYQENVPPGPFSITNLFNTLQGQLDVKVEEEDGRVTQWQVASNSIPYLTRKGQIRYTTAMGKPTSVGGDSLQQPFFWTGEFSWGWLNNVSLYGGSVLTNRDYQSLATGVGFNLNSLGSLSFDVTRSDAQLHNQNKETGYSYRANYSKRFESTGSQLTFAGYRFSDKNFVSMNEYINDTNHYTNYQNEKESYIVTFNQYLESLRLNTYVSLARNTYWDASSNVNYSLSLSRDFDIGPLKNVSTSLTFSRINWEDDNQDQLYLNISIPWGTSRTLSYGMQRNQDNNISHTASWYDSSDRNNSWSVSASGDNDEFKDMEASLRASYQHNTENGRLYLSGTSQRDSYYSLNASWNGSFTATRHGAAFHDYSGSADSRFMIDADGAEDIPLNNKRAVTNRYGIGVIPSVSSYITTSLSVDTRNLPENVDIENSVITTTLTEGAIGYAKLDTRKGYQIMGVIRLADGSHPPLGISVKDETSHKELGLVADGGFVYLNGIQDDSKLTLRWGDKSCFIQPPKSSNLTTGTVILPCIS

SEQ ID NO: 19703 - protein, 224 aa, Escherichia coli; identical to SEQ ID NO: 4515

SEQ ID NO: 19704 - protein, 784 aa, Escherichia coli; identical to SEQ ID NO: 2244

SEQ ID NO: 19705 - protein, 213 aa, Escherichia coli; identical to SEQ ID NO: 2232

SEQ ID NO: 19706 - protein, 249 aa, Escherichia coli; identical to SEQ ID NO: 8251

SEQ ID NO: 19707 - protein, 678 aa, Escherichia coli
MVPSTFSRLKAARCLPVVLAALIFAGCGTHTPDQSTAYMQGTAQADSAFYLQQMQQSSDDTRINWQLLAIRALVKEGKTGQAVELFNQLPQELNDAQRREKTLLAVEIKLAQKDFAGAQNLLAKITPADLEQNQQARYWQAKIDASQGRPSIDLLRALIAQEPLLGAKEKQQNIDATWQALSSMTQEQANTLVINADENILQGWLDLQRVWFDNRNDPDMMKAGIADWQKRYPNNPGAKMLPTQLVNVKAFKPASTNKIALLLPLNGQAAVFGRTIQQGFEAAKNIGTQPVAAQVAAAPAADVAEQPQPQTVDGVASPAQASVSDLTGEQPAAQPVPVSAPATSTAAVSAPANPSAELKIYDTSSQPLSQILSQVQQDGASIVVGPLLKNNVEELLKSNTPLNVLALNQSENIENRVNICYFALSPEDEARDAARHIRDQGKQAPLVLIPRSSLGDRVANAFAQEWQKLGGGTVLQQKFGSTSELRAGVNGGSGIALTGSPITLRATTDSGMTTNNPTLQTTPTDDQFTNNGGRVDAVYIVATPGEIAFIKPMIAMRNGSQSGATLYASSRSAQGTAGPDFRLEMEGLQYSEIPMLAGGNLPLMQQALSAVNNDYSLARMYAMGVDAWSLANHFSQMRQVQGFEINGNTGSLTANPDCVINRKLSWLQYQQGQVVPVS

SEQ ID NO: 19708 - protein, 539 aa, Escherichia coli; identical to SEQ ID NO: 3050

SEQ ID NO: 19709 - protein, 746 aa, Escherichia coli; identical to SEQ ID NO: 5629

SEQ ID NO: 19710 - protein, 236 aa, Escherichia coli
MTNTWNRLALLIFAVLSLLVAGELQAGVVVGGTRFIFPADRESISILLTNTSQESWFINSKINRPTRWAGGEASTVPAPLLAAPPLILLKPGTTGTLRLLRTESDILPVDRETLFELSIASVPSGKVENQSVKVAMRSVFKLFWRPEGLPGDPLEAYQQLRWTRNSQGVQLTNPTPYYINLIQVSVNGKALSNVGVVPPKSQRQTSWCQAIAPCHVAWRAINDYGGLSAKKEQNLP

SEQ ID NO: 19711 - protein, 747 aa, Escherichia coli; identical to SEQ ID NO: 4126

SEQ ID NO: 19712 - protein, 654 aa, Escherichia coli; identical to SEQ ID NO: 5823

SEQ ID NO: 19713 - protein, 241 aa, Escherichia coli; identical to SEQ ID NO: 13785

SEQ ID NO: 19714 - protein, 230 aa, Escherichia coli; identical to SEQ ID NO: 2580

SEQ ID NO: 19715 - protein, 208 aa, Escherichia coli; identical to SEQ ID NO: 1949

SEQ ID NO: 19716 - protein, 231 aa, Escherichia coli; identical to SEQ ID NO: 5780

SEQ ID NO: 19717 - protein, 774 aa, Escherichia coli
MTPLRVFRKTTPLVNAIRLSLLPLAGLSFSAFAAQVNIAPGSLDKALNQYAAHSGFTLSVDASLTRGKQSNGLHGDYDVESGLQQLLDGSGLQVKPLGNNSWTLEPAPAPKEDALTVVGDWLGDARENDVFEHAGVRDVIRREDFAKTGATTMREVLNRIPGVSAPENNGTGSHDLAMNFGIRGLNPRLASRSTVLMDGIPVPFAPYGQPQLSLAPVSLGNMDAIDVVRGGGAVRYGPQSVGGVVNFVTRAIPQDFGIEAGVGGQLSPTSSQNNPKETHNLMVGGTADNGFGTALLYSGTRGSDWREHSATRIDDLMLKSKYAPDEVHTFNSLLQYYDGEADMPGGLSRADYDADRWQSTRPYDRFWGRRKLASLGYQFQPDSQHKFNIQGFYTQTLRSGYLEQGKRITLSPRNYWVRGIEPRYSQIFMIGPSAHEVGVGYRYLNESTHEMRYYTATSSGQLPSGSSPYDRDTRSGTEAHAWYLDDKIDIGNWTITPGMRFEHIESYQNNAITGTHEEVSYNAPLPALNVLYHLTDSWNLYANTEGSFGTVQYSQIGKAVQSGNVEPEKARTWELGTRYDDGALTAEMGLFLINFNNQYDSNQTNDTVTARGKTRHTGLETQARYDLGTLTPTLDNVSIYASYAYVNAEIREKGDTYGNLVPFSPKHKGTLGVDYKPGNWTFNLNSDFQSSQFADNANTVKESADGSTGRIPGFMLWGARVAYDFGPQMADLNLAFGVKNIFDQDYFIRSYDDNNKGIYAGQPRTLYMQGSLKF

SEQ ID NO: 19718 - protein, 221 aa, Escherichia coli
MKNYLWLVALLPLLSGCESQAILVKKDDAYFAPPKTEAPPPADGRAGGVFETGYNWSLTADRRAYRVGDILTVILEESTQSSKQAKTNFGKSNTVDIGAPTIFGHTKDKLSGSIDANRDFDGSATSQQQNSLRGEITVSVHAVQPNGILEIRGEKWLTLNQGDEYIRLSGLVRADDIQNDNSVSSQRIADARISYAGRGALSDANAAGWLARLFNHPLFPI

SEQ ID NO: 19719 - protein, 191 aa, Escherichia coli; identical to SEQ ID NO: 13750

SEQ ID NO: 19720 - protein, 237 aa, Escherichia coli; identical to SEQ ID NO: 4356

SEQ ID NO: 19721 - protein, 118 aa, Escherichia coli [sequence omitted]

SEQ ID NO: 19722 - protein, 815 aa, Escherichia coli
MNIYRLSFVSCLVMAMPCALAVEFNLNVLDKSMRDRIDISLLKEKGVIAPGEYFVSVAVNNNQISNGQKINWQKKGDKTIPCINDSLVDKFGLKPDIRQSLPQIDRCIDFSSRPEMLFNFDQANQQLNISIPQAWLAWHSENWAPPSTWKEGVAGVLMDYNLFASNYRPQDGSSSTNLNAYGTTGINAGSWRLRSDYQLNNTDSEDSHEQSGGISRTYLFRPLPQLGSKLTLGETDFSSNIFDGFSYTGAALASDERMLPWELRGYAPQISGIAQTNATVTISQSGRVIYQKKVPPGPFIIDDLNQSVQGTLDVKVTEEDGRVNNFQVSAASTPFLTRQGQVRYKLAAGQPRPSMSHQTENETFFSNEVSWGMLSNTSLYGGLLLSGDDYHSAAMGIGQNMLWLGALSFDVTWASSHFDTQQDERGLSYRFNYSKQVDATNSTISLAAYRFSDRHFHSYANYLDHKYNDSDAQDEKQTISLSVGQPITPLNLNLYANLLHQTRWNADASTTANITAGFNVDIGDWRDISISTSFNTTHYEDKDRDNQIYLSISLPFGNGGRVGYDMQNSSHSTIHRMSWNDTLDERNSWGMSAGLQSDRPDNGAQVSGNYQHLSSAGEWDISGTYAANDYSSVSSSWSGSFTATQYGAAFHRRSSTNEPRLMVSTDGVADIPVQGNLDYTNHFGIAVVPLISSYQPSTVAVNMNDLPDGVTVAENVIKETWIEGAIGYKSLASRSGKDVNVIIRNASGQYPPLGADIRQDDSGISVGMVGEEGHAWLSGVAENQLFTVVWGEQSCIIHLPERLEDTTKRLILPCH

SEQ ID NO: 19723 - protein, 834 aa, Escherichia coli
MYKKLKLTTISELIKNIYCSLSVIIIGCASAYAVEFNKDLIEAEDRENVNLSQFETDGQLPVGKYSLSTLINNKRTPIHLDLQWVLIDNQTAVCVTPEQLTLLGFTDEFIEKTQQNLIDGCYPIEKEKQITTYLDKGKMQLSISAPQAWLKYKDANWTPPELWNHGIAGAFLDYNLYASHYAPHQGDNSQNISSYGQAGVNLGAWRLRTDYQYDQSFNNGKSQATNLDFPRIYLFRPIPAMNAKLTIGQYDTESSIFDSFHFSGISLKSDENMLPPDLRGYAPQITGVAQTNAKVTVSQNNRIIYQENVPPGPFAITNLFNTLQGQLDVKVEEEDGRVTQWQVASNSIPYLTRKGQIRYTTAMGKPTSVGGDSLQQPFFWTGEFSWGWLNNVSLYGGSVLTNRDYQSLAAGVGFNLNSLGSLSFDVTRSDAQLHNQDKETGYSYRANYSKRFESTGSQLTFAGYRFSDKNFVTMNEYINDTNHYTNYQNEKESYIVTFNQYLESLRLNTYISLARNTYWDASSNVNYSLSLSRDFDIGPLKNVSTSLTFSRINWEEDNQDQLYLNISIPWGTSRTLSYGMQRNQDNEISHTASWYDSSDRNNSWSVSASGDNDEFKDMKASLRASYQHNTENGRLYLSGTSQRDSYYSLNASWNGSFTATRHGAAFHDYSGSADSRFMIDADGTEDIPLNNKRAVTNRYGIGVIPSVSSYITTSLSVDTRNLPENVDIENSVITTTLTEGAIGYAKLDTRKGYQIIGVIRLADGSHPPLGISVKDETSHKELGLVADGGFVYLNGIQDDNKLALRWGDKSCFIQPPNSSNLTTGTAILPCISQN

SEQ ID NO: 19724 - protein, 368 aa, Escherichia coli; identical to SEQ ID NO: 4616

SEQ ID NO: 19725 - protein, 237 aa, Escherichia coli; identical to SEQ ID NO: 18206

SEQ ID NO: 19726 - protein, 897 aa, Escherichia coli; identical to SEQ ID NO: 1908

SEQ ID NO: 19727 - protein, 878 aa, Escherichia coli; identical to SEQ ID NO: 19051

SEQ ID NO: 19728 - protein, 826 aa, Escherichia coli
MLRMTPLASAIVALLLGIEAYAAEETFDTHFMIGGMKDQQVANIRLDDNQPLPGQYDIDIYVNKQWRGKYEIIVKDNPQETCLSREVIKRLGINSDNFASGKQCLTFEQLVQGGSYTWDIGVFRLDFSVPQAWVEELESGYVPPENWERGINAFYTSYYLSQYYSDYKASGNNKSTYVRFNSGLNLLGWQLHSDASFSKTNNNPGVWKSNTLYLERGFAQLLGTLRVGDMYTSSDIFDSVRFRGVRLFRDMQMLPNSKQNFTPRVQGIAQSNALVTIEQNGFVVYQKEVSPGPFAITDLQLAGGGADLDVSVKEADGSVTTYLVPYAAVPNMLQPGVSKYDLAAGRSHIEGASKQSDFVQAGYQYGFNNLLTLYGGSMVANNYYAFTLGAGWNTRIGAISVDATKSHSKQDNGDVFDGQSYQIAYNKFVSQTSTRFGLAAWRYSSRDYRTFNDHVWANNKDNYRRDENDVYDIADYYQNDFGRKNSFSANMSQSLPEGWGSVSLSTLWRDYWGRSGSSKDYQLSYSNNLRRISYTLAASQAYDENHHEEKRFNIFISIPFDWGDDVSTPRRQIYMSNSTTFDDQGFASNNTGLSGTVGSRDQFNYGVNLSHQHQGNETTAGANLTWNAPVATVNGSYSQSSTYRQAGASVSGGIVAWSGGVNLANRLSETFAVMNAPGIKDAYVNGQKYRTTNRNGVVIYDGMTPYRENHLMLDVSQSDSEAELRGNRKIAAPYRGAVVLVNFDTDQRKPWFIKALRADGQSLTFGYEVNDIHGHNIGVVGQGSQLFIRTNEVPPSVNVAIDKQQGLSCTITFGKEIDESRNYICQ

SEQ ID NO: 19729 - protein, 207 aa, Escherichia coli; identical to SEQ ID NO: 2211

SEQ ID NO: 19730 - protein, 881 aa, Escherichia coli
MPDHSLFRLRILPWCIALAMSGSYSSVWAEDDIQFDSRFLELKGDTKIDLKRFSSQGYVEPGKYNLQVQLNKQPLAEEYDIYWYAGEDDVSKSYACLTPELVAQFGLKEDVAKNLQWSHDGKCLKPGQLEGMEIKADLSQSALVISLPQAYLEYTWPDWDPPSRWDDGISGIIADYSITAQTRHEENGGDDSNEISGNGTVGVNLGPWRMRADWQTNYQHTRSNDDDDEFGGDDTQKKWEWSRYYAWRALPSLKAKLALGEDYLNSDIFDGFNYVGGSVSTDDQMLPPNLRGYAPDISGVAHTTAKVTVSQMGRVIYETQVPAGPFRIQDLGDSVSGTLHIRIEEQNGQVQEYDISTASMPYLTRPGQVRYKIMMGRPQEWGHHVEGGFFSGAEASWGIANGWSLYGGALGDENYQSAALGVGRDLSTFGAVAFDVTHSHTKLDKDTAYGKGSLDGNSFRVSYSKDFDQLNSRVTFAGYRFSEENLMTMSEYLDASDSEMVRTGNDKEMYTATYNQNFRDAGVSVYLNYTRHTYWDREEQTNYNIMLSHYFNMGSIRNMSVSLTGYRYEYDNRADKGMYISLSMPWGDNSTVSYNGNYGSGTDSSQVGYFSRVDDATHYQLNIGTSDKHTSVDGYYSHDGSLAQVDLSANYHEGQYTSAGLSLQGGATLTTHGGALHRTQNMGGTRLLIDADGVADVPVEGNGAAVYTNMFGKAVVSDVNNYYRNQAYIDLNKLPENAEATQSVVQATLTEGAIGYRKFAVISGQKAMAVLRLQDGSHPPFGAEVKNDNEQTVGLVDDDGSVYLAGVKPGEHMSVFWSGVAHCDINLPDPLPADLFNGLLLPCQHKGNVAPVVPDDIKPVIQEQTQQVTPTDPPVSVSANQ

SEQ ID NO: 19731 - protein, 250 aa, Escherichia coli
MSDLLCSAKLGAMRLALLLSATSLSALASVTPDRTRLIFNESDKSISVTLRNNDPKLPYLAQSWIEDEKGNKITSPLTVLPPVQRIDSMMNGQVKVQGMPDINKLPADRESMFYFNVREIPPKSNKPNTLQIALQTRIKLFWRPKALEKVSMKSPWQHKVTLTRSGQAFTVNNPTPYYVIISNASAQKNGNPAAGFSPLVIEPKTTVPLNVKMDSVPVLTYVNDFGARMPLFFQCNGNSCQVDEEQSRKG

SEQ ID NO: 19732 - protein, 686 aa, Escherichia coli; identical to SEQ ID NO: 3129

SEQ ID NO: 19733 - protein, 351 aa, Escherichia coli; identical to SEQ ID NO: 2519

SEQ ID NO: 19734 - protein, 367 aa, Escherichia coli; identical to SEQ ID NO: 2433

SEQ ID NO: 19735 - protein, 332 aa, Escherichia coli; identical to SEQ ID NO: 2701

SEQ ID NO: 19736 - protein, 838 aa, Escherichia coli; identical to SEQ ID NO: 2795

SEQ ID NO: 19737 - protein, 446 aa, Escherichia coli; identical to SEQ ID NO: 2176

SEQ ID NO: 19738 - protein, 241 aa, Escherichia coli; identical to SEQ ID NO: 2863

SEQ ID NO: 19739 - protein, 191 aa, Escherichia coli; identical to SEQ ID NO: 2727

SEQ ID NO: 19740 - protein, 102 aa, Escherichia coli; identical to SEQ ID NO: 1829

SEQ ID NO: 19741 - protein, 365 aa, Escherichia coli; identical to SEQ ID NO: 2403

SEQ ID NO: 19742 - protein, 242 aa, Escherichia coli; identical to SEQ ID NO: 2697

SEQ ID NO: 19743 - protein, 678 aa, Escherichia coli; identical to SEQ ID NO: 8519

SEQ ID NO: 19744 - protein, 865 aa, Escherichia coli
MTIEYTKNYHHLTRIATFCALLYCNTAFSAELVEYDHTFLMGQNASNIDLSRYSEGNPAIPGVYDVSVYVNDQPIINQSITFVAIEGKKNAQACITLKNLLQFHINSPDINNEKAVLLARDETLGNCLNLTEIIPQASVRYDVNDQRLDIDVPQAWVMKNYQNYVDPSLWENGINAAMLSYNLNGYHSETPGRKNESIYAAFNGGMNLGAWRLRASGNYNWMTDSGSNYDFKNRYVQRDIASLRSQLILGESYTTGETFDSVSIRGIRLYSDSRMLPPTLASFAPIIHGVANTNAKVTITQGGYKIYETTVPPGAFVIDDLSPSGYGSDLIVTIEESDGSKRTFSQPFSSVVQMLRPGVGRWDISGGQVLKDDIQDEPNLFQASYYYGLNNYLTGYTGIQITDNNYTAGLLGLGLNTSVGAFSFDVTHSNVRIPDDKTYQGQSYRVSWNKLFEETSTSLNIAAYRYSTQNYLGLNDALTLIDEVKHPEQDLEPKSMRNCSRMKNQVTVSINQPLKFEKKDYGSFYLSGSWSDYWASGQNRSNYSIGYSNSTSWGSYSVSAQRSWNEDGDTDDSVYLSFTIPIEKLLGTEQRTSGFQSIDTQISSDFKGNNQLNVSSSGYSDNARVSYSVNTGYTMNKASKDLSYVGGYASYESPWGTLAGSISANSDNSRQVSLSTDGGFVLHSGGLTFSNDSFSDSDTLAVVQAPGAQGARINYGNSTIDRWGYGVTSALSPYHENRIALDINDLENDVELKSTSAVAVPRQGSVVFADFETVQGQSAIMNITRSDGKNIPFAADIYDEQGNVIGNVGQGGQAFVRGIEQQGNISIKWLEQSKPVSCLAHYQQSPEAEKIAQSIILNGIRCQIQ

SEQ ID NO: 19745 - protein, 246 aa, Escherichia coli; identical to SEQ ID NO: 1985

SEQ ID NO: 19746 - protein, 266 aa, Escherichia coli; identical to SEQ ID NO: 1894

SEQ ID NO: 19747 - protein, 204 aa, Escherichia coli; identical to SEQ ID NO: 2957

SEQ ID NO: 19748 - protein, 866 aa, Escherichia coli
MYRTHRQHSLLSSGGVPSFIGGLVVFVSAAFNAQAETWFDPAFFKDDPSMVADLSRFEKGQKITPGVYRVDIVLNQTIVDTRNVNFVEITPEKGIAACLTTESLDAMGVNTDAFPAFKQLDKQACVPLAEIIPDASVTFNVNKLRLEISVPQIAIKSNARGYVPPERWDEGINALLLGYSFSGANSIHSSADSDSGDSYFLNLNSGVNLGPWRLRNNSTWSRSSGQTAEWKNLSSYLQRAVIPLKGELTVGDDYTAGDFFDSVSFRGVQLASDDNMLPDSLKGFAPVVRGIAKSNAQITIKQNGYTIYQTYVSPGAFEISDLYSTSSSGDLLVEIKEADGSVNSYSVPFSSVPLLQRQGRIKYAVTLAKYKTNSNEQQVSKFAQATLQWGGPWGTTWYGGGQYAEYYRAAMFGLGFNLGDFGAISFDATQAKSTLADQSEHKGQSYRFLYAKTLNHLGTNFQLMGYRYSTSGFYTLSDTMYKHMDGYEFNDGDDEDTPMWSRYYNLFYTKRGKLQVNISQQLGEYGSFYLSGSQQTYWHTDQQDRLLQFGYNTQIKDLSLGISWNYSKSRGQPDADQVFALNFSLPLNLLLPRSNDSYTRKKNYAWMTSNTSIDNEGHTTQNLGLTETLLDDGNLSYSVQQGYNSEGKTANGSASMDYKGAFADARVGYNYSDNGSQQQLNYALSGSLVAHSQGITLGQSLGETNVLIAAPGAENTRVANSTGLKTDWRGYTVVPYATSYRENRIALDAASLKRNVDLENAVVNVVPTKGALVLAEFNAHAGARVLMKTSKQGIPLRFGAIATLDGVQANSGIIDDDGSLYMAGLPAKGTISVRWGEAPDQICHINYELTEQQINSAITRMDAICR

SEQ ID NO: 19749 - protein, 650 aa, Escherichia coli; identical to SEQ ID NO: 2146

SEQ ID NO: 19750 - protein, 161 aa, Escherichia coli; identical to SEQ ID NO: 2582

SEQ ID NO: 19751 - protein, 511 aa, Escherichia coli; identical to SEQ ID NO: 2466

SEQ ID NO: 19752 - protein, 729 aa, Escherichia coli; identical to SEQ ID NO: 2074

SEQ ID NO: 19753 - protein, 249 aa, Escherichia coli; identical to SEQ ID NO: 2793

SEQ ID NO: 19754 - protein, 359 aa, Escherichia coli
MKKYLALALIAPLLISCSTTKKGDTYNEAWVKDTNGFDILMGQFAHNIENIWGFKEVVIAGPKDYVKYTDQYQTRSHINFDDGTITIETIAGTEPAAHLRRAIIKTLLMGDDPSSVDLYSDVDDITISKEPFLYGQVVDNTGQPIRREGRASNFADYLLKNRLKSRSNGLRIIYSVTINMVPNHLDKRAHKYLGMVRQASRKYGVDESLILAIMQTESSFNPYAVSRSDALGLMQVVQHTAGKDVFRSQGKSGTPSRSFLFDPASNIDTGTAYLAMLNNVYLGGIDNPTSRRYAVITAYNGGAGSVLRVFSNDKIQAANIINTMTPGDVYQTLTTRHPSAESRRYLYKVNTAQKSYRRR

SEQ ID NO: 19755 - protein, 700 aa, Escherichia coli; identical to SEQ ID NO: 2784

SEQ ID NO: 19756 - protein, 673 aa, Escherichia coli
MKMTRLYPLALGGLLLPAIANAQTSQQDESTLVVTASKQSSRSASANNVSSTVVSAPELSDAGVTASDKLPRVLPGLNIENSGNMLFSTISLRGVSSAQDFYNPAVTLYVDGVPQLSTNTIQALTDVQSVELLRGPQGTLYGKSAQGGIINIVTQQPDSTPRGYIEGGVSSRDSYRSKFNLSGPIQDGLLYGSVTLLRQVDDGDMINPATGSDDLGGTRASIGNVKLRLAPDDQPWEMGFAASRECTRATQDAYVGWNDIKGRKLSISDGSPDPYMRRCTDSQTLSGKYTTDDWVFNLISAWQQQHYSRTFPSGSLIVNMPQRWNQDVQELRAATLGDARTVDMVFGLYRQNTREKLNSAYDMPTMPYLSSTGYTTAETLAAYSDLTWHLTDRFDIGGGVRFSHDKSSTQYHGSMLGNPFGDQGKSNDDQVLGQLSAGYMLTDDWRVYTRVAQGYKPSGYNIVPTAGLDAKPFVAEKSINYELGTRYETADITLQAATFYTHTKDMQLYSGPVGMQTLSNAGKADATGVELEAKWRFAPGWSWDINGNVIRSEFTNDSELYHGNRVPFVPRYGAGSSVNGVIDTRYGALMPRLAVNLVGPHYFDGDNQLRQGTYATLDSSLGWQATERMNISVYVDNLFDRRYRTYGYMNGSSAVAQVNMGRTVGINTRIDFF

SEQ ID NO: 19757 - protein, 746 aa, Escherichia coli; identical to SEQ ID NO: 4083

SEQ ID NO: 19758 - protein, 774 aa, Escherichia coli
MTPLRVFRKTTPLVNAIRLSLLPLAGLSFSAFAAQVNIAPGSLDKALNQYAAHSGITLSVDASLTRGKQSNGLHGDYDVESGLQQLLDGSGLQVKPLGNNSWTLEPAPAPKEDALTVVGDWLGDARENDVFEHAGARDVIRREDFAKTGATTMREVLNRIPGVSAPENNGTGSHDLAMNFGIRGLNPRLASRSTVLMDGIPVPFAPYGQPQLSLAPVSLGNMDAIDVVRGGGAVRYGPQSVGGVVNFVTRAIPQDFGIEAGVEGQLSPTSSQNNPKETHNLMVGGTADNGFGTALLYSGTRGSDWREHSATRIDDLMLKSKYAPDEVHTFNSLLQYYDGEADMPGGLSRADYDADRWQSTRSYDRFWGRRKLASLGYQFQPDSQHKFNIQGFYTQTLRSGYLEQGKRITLSPRNYWVRGIEPRYSQIFMIGPSAHEVGVGYRYVNESTHEMRYYTATSSGQLPSGSSPYDRDTRSGTEAHAWYLDDKIDIGNWTITPGMRFEHIESYQNNAITGTHEEVSYNAPLPALNVLYHLTDSWNLYANTEGSFGTVQYSQIGKAVQSGNVEPEKARTWELGTRYDDGALTAEMGLFLINFNNQYGSNQTNDTVTARGKTRHTGLETQARYDLGTLTPTLDNVSIYASYAYVNAEIREKGDTYGNLVPFSPKHKGTLGVDYKPGNWTFNLNSDFQSSQFADNANTVKESADGSTGRIPGFMLWGARVAYDFGPQMADLNLAFGVKNIFDQDYFIRSYNDNNKGIYAGQPRTLYMQGSLKF

SEQ ID NO: 19759 - protein, 541 aa, Escherichia coli; identical to SEQ ID NO: 3377

SEQ ID NO: 19760 - protein, 432 aa, Escherichia coli; identical to SEQ ID NO: 2026

SEQ ID NO: 19761 - protein, 784 aa, Escherichia coli; identical to SEQ ID NO: 2244

SEQ ID NO: 19762 - protein, 200 aa, Escherichia coli; identical to SEQ ID NO: 1793

SEQ ID NO: 19763 - protein, 747 aa, Escherichia coli; identical to SEQ ID NO: 2072

SEQ ID NO: 19764 - protein, 230 aa, Escherichia coli
MMTKIKLLMLIIFYLIISASAHAAGGIALGATRIIYPADAKQTAVWIRNSHTNERFLVNSWIENSSGVKEKSFIITPPLFVSEPKSENTLRIIYTGPPLAADRESLFWMNVKTIPSVDKNALNGRNVLQLAILSRMKLFLRPIQLQELPAEAPDTLKFSRSGNYINVHNPSPFYVTLVNLQVGSQKLGNAMAAPRVNSQIPLPSGVQGNLKFQTVNDYGSVTPVREVNLN

SEQ ID NO: 19765 - protein, 663 aa, Escherichia coli; identical to SEQ ID NO: 1910

SEQ ID NO: 19766 - protein, 430 aa, Escherichia coli; identical to SEQ ID NO: 2617

SEQ ID NO: 19767 - protein, 170 aa, Escherichia coli
MSGILTRWRQFGKRYFWPHLLLGMVAASLGLPALSNAAEPNAPAKATTRNHESSAKVNFGQLALLEANTRRPNSNYSVDYWHQHAIRTVIRHLSFAMAPQTLPVAEESLPLQAQHLALLDTLSALLTQEGTPSEKGYRIDYAHFTPQAKFSTPVWISQAQGIRAGPQRLT

SEQ ID NO: 19768 - protein, 193 aa, Escherichia coli; identical to SEQ ID NO: 2246

SEQ ID NO: 19769 - protein, 239 aa, Escherichia coli; identical to SEQ ID NO: 2759

SEQ ID NO: 19770 - protein, 478 aa, Escherichia coli; identical to SEQ ID NO: 2404

SEQ ID NO: 19771 - protein, 232 aa, Escherichia coli; identical to SEQ ID NO: 2087

SEQ ID NO: 19772 - protein, 213 aa, Escherichia coli; identical to SEQ ID NO: 2232

SEQ ID NO: 19773 - protein, 334 aa, Escherichia coli
MKKNQFLKESDVTAESVFFMKRRQVLKALGISAAALSLPHAAHADLLSWFKGNDRPPAPAGKALEFSKPAAWQNNLPLTPADKVSGYNNFYEFGLDKADPAANAGSLKTDPWTLKISGEVAKPLTLDHDDLTRRFPLEERIYRMRCVEAWSMVVPWIGSPLHKLLALAEPTSNAKYVAFETIYAPEQMPGQQDRFIGGGLKYPYVEGLRLDEAMHPLTLMTVGVYGKALPPQNGAPVRLIVPWKYGFKGIKSIVSIKLTRERPPTTWNLAAPDEYGFYANVNPHVDHPRWSQATERFIGSGGILDVQRQPTLLFNGYADQVASLYRGLDLRENF

SEQ ID NO: 19774 - protein, 362 aa, Escherichia coli; identical to SEQ ID NO: 2434

SEQ ID NO: 19775 - protein, 236 aa, Escherichia coli; identical to SEQ ID NO: 2726

SEQ ID NO: 19776 - protein, 122 aa, Escherichia coli; identical to SEQ ID NO: 2915

SEQ ID NO: 19777 - protein, 565 aa, Escherichia coli; identical to SEQ ID NO: 2669

SEQ ID NO: 19778 - protein, 274 aa, Escherichia coli; identical to SEQ ID NO: 2309

SEQ ID NO: 19779 - protein, 828 aa, Escherichia coli
MKLSRRSFMKANAVAAAAAAAGLSVPGVARAVVGQQEAIKWDKAPCRFCGTGCGVLVGTQQGRMVACQGDPDAPVNRGLNCIKGYFLPKIMYGKDRLTQPLLRMKNGKYDKEGEFTPITWDQAFDVMEEKFKTALKEKGPESIGMFGSGQWTIWEGYAASKLFKAGFRSNNIDPNARHCMASAVVGFMRTFGMDEPMGCYDDIEQADAFVLWGANMAEMHPILWSRITNRRLSNQNVTVAVLSTYQHRSFELADNGIIFTPQSDLVILNYIANYIIQNNAINQDFFSKHVNLRKGATDIGYGLRPTHPLEKAAKNPGSDASEPMSFEDYKAFVAEYTLEKTAEMTGVPKDQLEQLAQLYADPNKKVISYWTMGFNQHTRGVWANNLVYNLHLLTGKISQPGCGPFSLTGQPSACGTAREVGTFAHRLPADMVVTNEKHRDICEKKWNIPSGTIPAKIGLHAVAQDRALKDGKLNVYWTMCTNNMQAGPNINEERMPGWRDPRNFIIVSDPYPTVSALAADLILPTAMWVEKEGAYGNAERRTQFWRQQVQAPGEAKSDLWQLVQFSRRFKTEEVWPEDLLAKKPELRGKTLYEVLYATPEVSKFPVSELAEDQLNDESRELGFYLQKGLFEEYAWFGRGHGHDLAPFDDYHKARGLRWPVVNGKETQWRYSEGNDPYVKAGEGYKFYGKPDGKAVIFALPFEPAAEAPDEEYDLWLSTGRVLEHWHTGSMTRRVPELHRAFPEAVLFIHPLDAKARDLRRGDKVKVVSRRGEVISIVETRGRNRPPQGLVYMPFFDAAQLVNKLTLDATDPLSKETDFKKCAVKLEKV

SEQ ID NO: 19780 - protein, 472 aa, Escherichia coli; identical to SEQ ID NO: 7769

SEQ ID NO: 19781 - protein, 412 aa, Escherichia coli
MKQWIAALLLMLIPGVQAAKPQKVTLMVDDVPVAQVLQALAEQEKLNLVVSPDVSGTVSLHLTDVPWKQALQTVVKSAGLITRQEGNILSVHSIAWQNNNIARQEAEQARAQANLPLENRSITLQYADAGELAKAGEKLLSAKGSMTVDKRTNRLLLRDNKTALSALEQWVAQMDLPVGQVELSAHIVTINEKSLRELGVKWTLADAQHAGGVGQVTTLGSDLSVATATTHVGFNIGRINGRLLDLELSALEQKQQLDIIASPRLLASHLQPASIKQGSEIPYQVSSGESGATSVEFKEAVLGMEVTPTVLQKGRIRLKLHISQNVPGQVLQQADGEVLAIDKQEIETQVEVKSGETLALGGIFTRKNKSGQDSVPLLGDIPLFGQLFRHDGKEDERRELVVFNTPRLVSSE

SEQ ID NO: 19782 - protein, 208 aa, Escherichia coli; identical to SEQ ID NO: 8500

SEQ ID NO: 19783 - protein, 233 aa, Escherichia coli
MKTCITKGIVTVSLTAILLSCSSAWAAGKGGIGLAATRLVYSEGEEQISLGVRNTCPDVPYLIQSWVMTPDNKKSADFIITPPLFVLNPANENLLRIMYIGAPLAKDRETLFFTSVRAVPSTTKRKEGNTLKIATQSVIKLFWRPKGLAYPLGEAPAKLRCTSSADMVTVSNPTPYFITLTDLKIGGKVVKNQMISPFDKYQFSLPKGAKNSSVTYRTINDYGAETPQLNCKS

SEQ ID NO: 19784 - protein, 760 aa, Escherichia coli; identical to SEQ ID NO: 2080

SEQ ID NO: 19785 - protein, 365 aa, Escherichia coli; identical to SEQ ID NO: 2102

SEQ ID NO: 19786 - protein, 231 aa, Escherichia coli; identical to SEQ ID NO: 2794

SEQ ID NO: 19787 - protein, 614 aa, Escherichia coli
MIKKASLLTACSVTAFSAWAQDTSPDTLVVTANRFEQPRSTVLAPTTVVTRQDIDRWQSTSVNDVLRRLPGVDITQNGGSGQLSSIFIRGTNASHVLVLIDGVRLNLAGVSGSADLSQFPIALVQRVEYIRGPRSAVYGSDAIGGVVNIITTRDEPGTEISAGWGSNSYQNYDVSTQQQLGDKTRVTLLGDYAHTHGYDVVAYGNTGTQAQTDNDGFLSKTLYGALEHNFTDAWSGFVRGYGYDNRTNYDAYYSPGSPLLDTRKLYSQSWDAGLRYNGELIKSQLITSYSHSKDYNYDPHYGRYDSSATLDEMKQYTVQWANNVIVGHGSIGAGVDWQKQTTTPGTGYVEDGYDQRNTGIYLTRLQQVGDFTFEGAARSDDNSQFGRHGTWQTSAGWEFIEGYRFIASYGTSYKAPNLGQLYGFYGNPNLDPEKSKQWEGAFEGLTAGVNWRISGYRNDVSDLIDYDDHTLKYYNEGKARIKGVEATANFDTGPLTHTVSYDYVDARNAITDTPLLRRAKQQVKYQLDWQLYDFDWGITYQYLGTRYDKDYSSYPYQTVKMGGVSLWDLAVAYPVTSHLTVRGKIANLFEKDYETVYGYQTAGREYTLSGSYTF

SEQ ID NO: 19788 - protein, 162 aa, Escherichia coli; identical to SEQ ID NO: 1973

SEQ ID NO: 19789 - protein, 72 aa, Escherichia coli; identical to SEQ ID NO: 2163

SEQ ID NO: 19790 - protein, 161 aa, Escherichia coli; identical to SEQ ID NO: 2582

SEQ ID NO: 19791 - protein, 861 aa, Escherichia coli; identical to SEQ ID NO: 10561

SEQ ID NO: 19792 - protein, 836 aa, Escherichia coli; identical to SEQ ID NO: 19362

SEQ ID NO: 19793 - protein, 122 aa, Escherichia coli; identical to SEQ ID NO: 2915

SEQ ID NO: 19794 - protein, 884 aa, Escherichia coli; identical to SEQ ID NO: 7254

SEQ ID NO: 19795 - protein, 204 aa, Escherichia coli; identical to SEQ ID NO: 2957

SEQ ID NO: 19796 - protein, 516 aa, Escherichia coli
MTAFRAAFKAYRMHQVLILPRFARLTFALGLATAVFPVDAEYYFNPRFLSNDLAESVDLSAFTKGREAPPGTYRVDIYLNDEFMASRDITFIADDNNADLIPCLSTDLLVSLGIKKSALLDNKEHSADKHVPDNSACTPLQDRLADASSEFDVGQQHLSLSVPQIYVGRMAHGYVSPDLWEEGINAGLLNYSFNGNSINNRSNHNAGKSNYAYLNLQSGINIGSWRLRDNSTWSYNSGSSNSSDSNKWQHINTSAERDIIPLRSRLTVGDSYTDGDIFDSVNFRGLKINSTEAMLPDSQHGFAPVIHGIARGTAQVSVKQNGYDVYQTTVPPGPFTIDDINSAANGGNLQVTIKEADGSIQTLYVPYSSVPVLQRAGYTRYALAMGEYRSGNNLQSTPKFVQASLMHGLKGNWTPYGGMQIAEDYQAFNLGIGKDLGLFGAFSFDITQANTTLADDTRHSGQSVKFVYSKSFYQTGTNIQVAGYRYSTQGFYNLSDSAYSRMSGYTDYFVINRLSD

SEQ ID NO: 19797 - protein, 700 aa, Escherichia coli; identical to SEQ ID NO: 4566

SEQ ID NO: 19798 - protein, 259 aa, Escherichia coli; identical to SEQ ID NO: 12016

SEQ ID NO: 19799 - protein, 729 aa, Escherichia coli; identical to SEQ ID NO: 4557

SEQ ID NO: 19800 - protein, 342 aa, Escherichia coli; identical to SEQ ID NO: 19438

SEQ ID NO: 19801 - protein, 119 aa, Escherichia coli; identical to SEQ ID NO: 5512

SEQ ID NO: 19802 - protein, 656 aa, Escherichia coli; identical to SEQ ID NO: 19414

SEQ ID NO: 19803 - protein, 412 aa, Escherichia coli; identical to SEQ ID NO: 7283

SEQ ID NO: 19804 - protein, 249 aa, Escherichia coli; identical to SEQ ID NO: 4602

SEQ ID NO: 19805 - protein, 840 aa, Escherichia coli; identical to SEQ ID NO: 4545

SEQ ID NO: 19806 - protein, 725 aa, Escherichia coli; identical to SEQ ID NO: 2986

SEQ ID NO: 19807 - protein, 892 aa, Escherichia coli
MCLAADFIFSLSVGADMFSGDGGQLLSDKSLTGSAGGGNNRMKFNILPLAFFIGIIVSPARAELYFNPRFLSDDPDAVADLSAFTQGQELPPGVYRVDIYLNDTYISTRDVQFQMSQDGKQLAPCLSPEHMSAMGVNRYAVPGMERLPADTCTSLNSMIQGATFRFDVGQQRLYLTVPQLYMSNQARGYIAPEYWDNGITAALLNYDFSGNRVRDSYGGTSDYAYLNLKTGLNIGSWRLRDNTSWSYSAGKGYSQNNWQHINTWLERDIVPLRSRLTMGDSYTRGDIFDGVNFRGIQLASDDNMVPDSQRGYAPTIHGISRGTSRISIRQNGYEIYQSTLPPGPFEINDIYPAGSGGDLQVTLQEADGSVQRFNVPWSSVPVLQREGHLKYALSAGEFRSGGHQQDNPRFAEGTLKYGLPAGWTVYGGAWIAERYRAFNLGMGKNMGWLGAVSLDATRANARLPDESRHDGQSYRFLYNKSLTETGTNIQLIGYRYSTRGYFSFADTAWKKMSGYSVLTQDGVIQIQPKYTDYYNLAYNKRGRVQVSISQQTGESSTLYLSGSHQSYWGTDRTDRQLNAGFNSSVNDISWSLNYSLSRNAWQHETDRILSFDVSIPFSHWMRSDSTSAWRNASARYSQTLEAHGQAASTAGLYGTSLGDNNLGYSIQSGYTRGGYEGSSKTGYASLNYRGGYGNASAGYSHSGGYRQLYYGLSGGILAHANGLTLSQPLGDTLILVRAPGASDTRIENQTGVSTDWRGYAVLPYATDYRENRVALDTNTLADNVDIENTVVSVVPTHGAVVRADYKTRVGVKVLMTLMRNGKAVPFGSVVTARNGGSSIAGENGQVYLSGMPLSGQVSVKWGSQTTDQCTADYKLPKESAGQILSHVTVSCR

SEQ ID NO: 19808 - protein, 241 aa, Escherichia coli; identical to SEQ ID NO: 12195

SEQ ID NO: 19809 - protein, 239 aa, Escherichia coli; identical to SEQ ID NO: 2496

SEQ ID NO: 19810 - protein, 241 aa, Escherichia coli; identical to SEQ ID NO: 2075

SEQ ID NO: 19811 - protein, 654 aa, Escherichia coli; identical to SEQ ID NO: 3854

SEQ ID NO: 19812 - protein, 713 aa, Escherichia coli; identical to SEQ ID NO: 4590

SEQ ID NO: 19813 - protein, 878 aa, Escherichia coli; identical to SEQ ID NO: 19363

SEQ ID NO: 19814 - protein, 721 aa, Escherichia coli; identical to SEQ ID NO: 9824

SEQ ID NO: 19815 - protein, 380 aa, Escherichia coli; identical to SEQ ID NO: 7247

SEQ ID NO: 19816 - protein, 831 aa, Escherichia coli; identical to SEQ ID NO: 4538

SEQ ID NO: 19817 - protein, 246 aa, Escherichia coli; identical to SEQ ID NO: 3838

SEQ ID NO: 19818 - protein, 229 aa, Escherichia coli; identical to SEQ ID NO: 4543

SEQ ID NO: 19819 - protein, 231 aa, Escherichia coli; identical to SEQ ID NO: 18534

SEQ ID NO: 19820 - protein, 753 aa, Escherichia coli; identical to SEQ ID NO: 6655

SEQ ID NO: 19821 - protein, 900 aa, Escherichia coli; identical to SEQ ID NO: 4548

SEQ ID NO: 19822 - protein, 686 aa, Escherichia coli; identical to SEQ ID NO: 3806

SEQ ID NO: 19823 - protein, 250 aa, Escherichia coli; identical to SEQ ID NO: 3855

SEQ ID NO: 19824 - protein, 363 aa, Escherichia coli; identical to SEQ ID NO: 3839

SEQ ID NO: 19825 - protein, 862 aa, Escherichia coli; identical to SEQ ID NO: 7218

SEQ ID NO: 19826 - protein, 237 aa, Escherichia coli; identical to SEQ ID NO: 3793

SEQ ID NO: 19827 - protein, 222 aa, Escherichia coli; identical to SEQ ID NO: 4595

SEQ ID NO: 19828 - protein, 673 aa, Escherichia coli; identical to SEQ ID NO: 19433

SEQ ID NO: 19829 - protein, 715 aa, Escherichia coli; identical to SEQ ID NO: 5610

SEQ ID NO: 19830 - protein, 746 aa, Escherichia coli; identical to SEQ ID NO: 4597

SEQ ID NO: 19831 - protein, 747 aa, Escherichia coli; identical to SEQ ID NO: 3857

SEQ ID NO: 19832 - protein, 266 aa, Escherichia coli; identical to SEQ ID NO: 3745

SEQ ID NO: 19833 - protein, 237 aa, Escherichia coli
MKMIAMQKNAAHTYAISSLLVLSLTGCAWIPSTPLVQGATSAQPVPGPTPVANGSIFQSAQPINYGYQPLFEDRRPRNIGDTLTIVLQENVSASKSSSANASRDGKTNFGFDTVPRYLQGLFGNARADVEASGGNTFNGKGGANASNTFSGTLTVTVDQVLVNGNLHVVGEKQIAINQGTEFIRFSGVVNPRTISGSNTVPSTQVADARIEYVGNGYINEAQNMGWLQRFFLNLSPM

SEQ ID NO: 19834 - protein, 224 aa, Escherichia coli; identical to SEQ ID NO: 3792

SEQ ID NO: 19835 - protein, 191 aa, Escherichia coli; identical to SEQ ID NO: 2727

SEQ ID NO: 19836 - protein, 208 aa, Escherichia coli; identical to SEQ ID NO: 1948

SEQ ID NO: 19837 - protein, 663 aa, Escherichia coli
MLNGIYSMRLKKRYLCTVLTLAFTQQAVAAQESDTLTVWSSPVSSTTTTVLDQPTMKALDKQNVAQALSVVPGVVLQKSGSRNEEQVKVRGFDSRQVPVYFDGVPIYVPYDGNLDLARILTNNLGAVEVSKGYSSLLQGPNQMGGAINITTQKPTKPLEASLGYRQGWSRSQDNAYDMHASFAASSDLGYLQVSGSQLKQDFLGLPHGVNNDIAGKHGKMINSSADDKRGIVKLGFTPRENDEYTLTYIKQDGEKDNPPYSGNSGQKSRYWQWPEYDKESFYYQGTTQLNDRFTLKSRLYRDTFENTLMMYNSLADLKNKKGSYSHYSDYSDGAGLQLAADVRENDLLSFAVNWKDDVHREKGAPHAAYDRYEDRTWSLASEYQWAAADNVDVVAGISYDWRDSVEAKKHEKDGSITHYDDNNQSAFNWQVMGKYHFANEDTLALSYYDRTRFPTLKERYTTSKPAYNQIAIVNPQLKPERARGVDLTWNGAFTHDWGFEVSVYYNRVSDAILSHNIDADTIQNQNSGTVDYSGLDAGIKGKISNILDVGLSYALIHADAKRKDIGKITDLPTQTMTAWMTLKPWEPLSVTLSEEARSSSYSNSDGSQKAAGFAVTHIRADYTLGHGFSVNASVNNLFDTKYAYSEGFIEEGRNFWAGIEYTF

SEQ ID NO: 19838 - protein, 362 aa, Escherichia coli; identical to SEQ ID NO: 4554

SEQ ID NO: 19839 - protein, 353 aa, Escherichia coli; identical to SEQ ID NO: 4569

SEQ ID NO: 19840 - protein, 656 aa, Escherichia coli; identical to SEQ ID NO: 6715

SEQ ID NO: 19841 - protein, 236 aa, Escherichia coli; identical to SEQ ID NO: 3821

SEQ ID NO: 19842 - protein, 214 aa, Escherichia coli
MMTKMSRYALITALAMFLAGCVGQREPAPVEEVKPAPEQPAEPQQPVPTVPSVPTIPQQPGPIEHEDQTAPPAPHIRHYDWNGAMQPMVSKMLGADGVTAGSVLLVDSVNNRTNGSLNAAEATETLRNALANNGKFTLVSAQQLSMAKQQLGLSPQDSLGTRSKAIGIARNVGAHYVLYSSASGNVNAPTLQMQLMLVQTGEIIWSGKGAVSQQ

SEQ ID NO: 19843 - protein, 660 aa, Escherichia coli; identical to SEQ ID NO: 7233

SEQ ID NO: 19844 - protein, 1024 aa, Escherichia coli; identical to SEQ ID NO: 10694

SEQ ID NO: 19845 - protein, 266 aa, Escherichia coli; identical to SEQ ID NO: 7272

SEQ ID NO: 19846 - protein, 111 aa, Escherichia coli; identical to SEQ ID NO: 3419

SEQ ID NO: 19847 - protein, 690 aa, Escherichia coli; identical to SEQ ID NO: 12210

SEQ ID NO: 19848 - protein, 866 aa, Escherichia coli
MYRTHRQHSLLSSGGVPSFIGGLVVFVSAAFNAQAETWFEPAFFKDDPSMVADLSRFEKGQKITPGVYRVDIVLNQTIVDTRNVNFVELTPEKGIAACLTTESLDAMGVNTDAFPAFKQLDKQACALLAEIIPDASVTFNVNKLRLEISVPQIAIKSNARGYVPPERWDEGINALLLGYSFSGANSIHSSADSDSGDSYFLNLNSGVNLGPWRLRNNSTWSRSSGQTAEWKNLISYLQRAVIPLKGELTVGDDYTAGDFFDSVSFRGVQLASDDNMLPDSLKGFAPVVRGIAKSNAQITIKQNGYTIYQTYVSPGAFEISDLYSTSSSGDLLVEIKEADGSVNSYSVPFSSVPLLQRQGRIKYAVTLAKYRTNSNEQQESKFAQATLQWGGPWGTTWYGGGQYAEYYRAAMFGLGFNLGDFGAISFDATQAKSTLADQSEHKGQSYRFLYAKTLNQLGTNFQLMGYRYSTSGFYTLSDTMYKHMDGYEFNDGDDEDTPMWSRYYNLFYTKRGKLQVNISQQLGEYGSFYLSGSQQTYWHTDQQDRLLQFGYNTQIKDLSLGGSWNYSKSRGQPDADQVFALNFSLPLNLLLPRSNDSYTRKKNYAWMTSNTSIDNEGHITQNLGLTETLLDDGNLSYSVQQGYNSEGKTANGSASMDYKGAFADARVGYNYSDNGSQQQLNYALSGSLVAHSQGITLGQSLGETNVLIAAPGAENTRVANSTGLKTDWRGYTVVPYATSYRENRIALDAASLKRNVDLENAVVNVVPTKGALVLAEFNAHAGARVLMKTSKQGIPLRFGAIATLDGVQANSGIIDDDGSLYMAGLPAKGTISVRWGEAPDQICHINYELTEQQINSAITRMDAICR

SEQ ID NO: 19849 - protein, 880 aa, Escherichia coli
MPDHSLFRLRILPWCIALAMSGSYSSVWAEDDIQFDSRFLELKGDTKIDLKRFSSQGYVEPGKYNLQVQLNKQPLAEEYDIYWYAGEDDASKSYACLTPELVAQFGLKEDVAKNLQWSHDAKCLKSGQLEGVEIKADLSQSALVISLPQAYLEYTYPDWDPPSRWDDGISGIVADYSINAQTRHEENGGDDSNEISGNGTVGVNLGPWRMRADWQTNYQHTRSNDDDEFSGDETQKKWEWSRYYAWRALPSLKAKLALGEDYLRSDIFDGFNYVGGSVSTDDQMLPPNLRGYAPDISGVAHTTAKVTVSQMGRVIYETQVPAGPFRIQDLGDSVSGTLHIRIEEQNGQVQEYDISTASMPYLTRPGQVRYKIMMGRPQEWGHHVEGEFFSGAEASWGIANGWSLYGGALGDENYQSAALGVGRDLSTFGAVAFDVTHSHTKLDKDTAYGKGSLDGNSFRVSYSKDFDQLNSRVTFAGYRFSEENFMTMSEYLDASDSGMVRTGNDKEMYTATYNQNFRDAGVSVYLNYTRHTYWDREEQTNYNIMLSHYFNMGSIRNVSISMTGYRYEYDNQADKGMYISLSMPWGDNSTVSYNGNYGSGTDSSQVGYFSRVDDATHYQLNVGTSDKHTSVDGYYSHDGSLAQVDLSANYHEGQYTSAGLSLQGGATLTAHGGALHRTQNMGGTRLLIDADGVADVPVEGNGAAVYTNMFGKAVVSDVNNYYRNQAYIDLNKLPENAEATQSVVQATLTEGAIGYRKFTVISGQKAMAVLRLSDGSHPPFGAEVKNDNEQTVGLVDDDGNVYLAGVKPGEHMSVFWSGVAHCDINLPDPLPADLFNGLLLPCQHKGNVAPVTSPAVKPAIQEQTQRVTPTEPPTSISVNQ

SEQ ID NO: 19850 - protein, 826 aa, Escherichia coli
MLRMTPLASVIVALLLGIEAYAAEETFDTHFMIGGMKDQQVANIRLDDNQPLPGQYDIDIYVNKQWRGKYEIIVKDNPQETCLSREVIKRLGINSDNFASGKQCLTFEQLVQGGSYTWDIGVFRLDFSVPQAWVEELESGYVPPENWERGINAFYTSYYLSQYYSDYKASGNNKSTYVRFNSGLNLLGWQLHSDASFSKTNNNPGVWKSNTLYLERGFAQLLGTLRVGDMYTSSDIFDSVRFRGVRLFRDMQMLPNSKQNFTPRVQGIAQSNALVTIEQNGFVVYQKEVPPGPFAITDLQLAGGGADLDVSVKEADGSVTTYLVPYAAVPNMLQPGVSKYDLAAGRSHIEGASKQSDFVQAGYQYGFNNLLTLYGGSMVANNYYAFTLGAGWNTRIGAISVDATKSHSKQDNGDVFDGQSYQIAYNKFVSQTSTRFGLAAWRYSSRDYRTFNDHVWANNKDNYRRDENDVYDIADYYQNDFGRKNSFSANMSQSLPEGWGSVSLSTLWRDYWGRSGSSKDYQLSYSNNLRRISYTLAASQAYDENHHEEKRFNIFISIPFDWGDDVSTPRRQKYMSNSTTFDDQGFASNNTGLSGTVGSRDQFNYGVNLSHQHQGNETTAGANLTWNAPVATVNGSYSQSSTYRQAGASVSGGIVAWSGGVNLANRLSETFAVMNAPGIKDAYVNGQKYRTTNRNGVVIYDGMTPYRENHLMLDVSQSDSEAELRGNRKIAAPYRGAVVLVNFDTDQRKPWFIKALRADGQSLTFGYEVNDIHGHNIGVVGQGSQLFIRTNEVPPSVNVAIDKQQGLSCTITFGKEIDESRNYICQ

SEQ ID NO: 19851 - protein, 161 aa, Escherichia coli; identical to SEQ ID NO: 2582

SEQ ID NO: 19852 - protein, 869 aa, Escherichia coli
MKIPTTTDIPQRYTWCLAGICYSSLAILPSFLSYAESYFNPAFLLENGTSVADLSRFERGNHQPAGVYRVDLWRNDEFIGSQDIVFESTTENTGDKSGGLMPCFNQVLLERISLNSSAFPELAQQQNNKCINLLKAVPDATINFDFAAMRLNITIPQIALLSSAHGYIPPEEWDEGIPALLLNYNFTGNRGNGNDSYFFSELSGINIGPWRLRNNGSWNYFRGNGYHSEQWNNIGTWVQRAIIPLKSELVMGDGNTGSDIFDGVGFRGIRLYSSDNMYPDSQQGFAPTVRGIARTAAQLTIRQNGFIIYQSYVSPGAFEITDLHPTSSNGDLDVTIDERDGNQQNYTIPYSTVPILQREGRFKFDLTAGDFRSGNSQQSSPFFFQGTALGGLPQEFTAYGGTQLSANYTAFLLGLGRNLGNWGTVSLDVTHARSQLADDSRHEGDSIRFLYAKSMNTFGTNFQLMGYRYSTQGFYTLDDVAYRRMEGYEYDYDYDGEHRDEPIIVNYHNLRFSRKDRLQLNISQSLNDFGSLYISGTHQKYWNTSDSDTWYQVGYTSSWVGISYSLSFSWNESVGIPDNERIVGLNVSVPFNVLTKRRYTRENALDRAYASFNANRNSNGQNSWLAGVGGTLLEGHNLSYHVSQGDTSNNGYTGSATANLQAAYGTLGVGYNYDRDQHDVNWQLSGGVVGHENGITLSQPLGDTNVLIKAPGAGGVRIENQTGILTDWRGYAVMPYATVYRYNRIALDTNTMGNSIDVEKNISSVVPTQGALVRANFDTRIGVRALITVTQGRKPVPFGSLVRENSTGITSMVGDDGQVYLSGAPLSGELLVQWGDGANSRCIAHYVLPKQSLQQAVTVISAVCTHPGS

SEQ ID NO: 19853 - protein, 833 aa, Escherichia coli
MAALSPPFIKYLSGMDTVNIYRLSFVSCLVVAMPCALAVEFNLNVLDKSMRDRIDISLLKEKGVIAPGEYFVSVAVNNNQISNGQKINWHKNDDKTIPCINDLLVDKFGLKPEVRQSLPLINQCVDFSSRPEMLFNFDQANQQLNITIPQAWLAWHSENWTPPSTWKEGVAGILMDYNLFASSYRPQDGSSSTNLNAYGTTGINAGAWRLRSDYQLNQTDSDDNHEQSGGISRTYLFRPLPQLGSKLTLGETDFSSNIFDGFSYTGAALASDERMLPWELRGYAPQISGIAQTNATVTISQSGRVIYQKKVPPGPFIIDDLNQSVQGTLDVKVTEEDGRVNNFQVSAASTPFLTRQGQVRYKLAAGQPRPSMSHQTENETFFSNEVSWGMLSNTSLYGGLLLSGDDYHSAAMGIGQNMLWLGALSFDVTWASSHFDTQQDERGLSYRFNYSKQVDATNSTISLAAYRFSDRHFHSYANYLDHKYNDSDAQDEKQTISLSVGQPITPLNLNLYANLLHQTWWNADASTTANITAGFNVDIGDWRDISISTSFNTTHYEDKDRDNQIYLSISLPFGNGGRVGYDMQNSSHSTTHRMSWNDTLDERNSWGMSAGLQSDRPDNGAQVSGNYQHLSSAGEWDISGTYAANDYSSVSSSWSGSFTATQYGAAFHRRSSTNEPRLMVSTDGVADIPVQGNLDYTNHFGIAVVPLISSYQPSTVAVNMNDLPDGVTVTENVIKETWIEGAIGYKSLASRSGKDVNVIIRNASGQFPPLGADIRQDDSGISVGMVGEEGHAWLSGVAENQKFTVVWGDSQHCSLHLPEHMEDTANRLILPCH

SEQ ID NO: 19854 - protein, 266 aa, Escherichia coli; identical to SEQ ID NO: 1894

SEQ ID NO: 19855 - protein, 863 aa, Escherichia coli
MHIRKHRLAGFFVRLFVACAFAAQAPLSSAELYFNPRFLADDPQAVADLSRFENGQELPPGTYRVDIYLNNGYMATRDVTFNTGDSEQGIVPCLTRAQLASMGLNTASVSGMNLLADDACVPLTSMIHDATAHLDVGQQRLNLTIPQAFMSNRARGYIPPELWDPGINAGLLNYNFSGNSVQNRIGGNSHYAYLNLQSGLNIGAWRLRDNTTWSYNRSDRSSGSKNKWQHINTWLERDIIPLRSRLTLGDGYTQGDIFDGINFRGAQLASDDNMLPDSQRGFAPVIHGIARGTAQVTIKQNGYDIYNSTVPPGPFTINDIYAAGNSGDLQVTIKEADGSTQIFTVPYSSVPLLQREGHTRYSITAGEYRSGNAQQEKPRFFQSTLLHGLPAGWTIYGGTQLADRYRAFNFGIGKNMGALGALSVDMTQANSTLPDDSQHDGQSVRFLYNKSLNESGTNIQLVGYRYSTSGYFNFADTTYSRMNGYNIETQDGVIQVKPKFTDYYNLAYNKRGKLQLTVTQQLGRTSTLYLSGSHQTYWGTSNVDEQFQAGLNTAFEDINWTLSYSLTKNAWQKGRDQMLALNVNIPFSHWLRSDSKSQWRHASASYSMSHDLNGRMTNLAGVYGTLLEDNNLSYSVQTGYAGGGDGNSGSTGYATLNYRGGYGNANIGYSHSDDIKQLYYGVSGGVLAHANGVTLGQPLNETVVLVKAPGAKDAKVENQTGVRTDWRGYAVLPYATEYRENRVALDTNTLADNVDLDNAVANVVPTRGAIVRAEFKARVGIKLLMTLTHNNKPLPFGAMVTSESSQSSGIVADNGQVYLSGMPLAGKVQVKWGEEENAHCVANYQLPPERQQQLLTQLSAECR

SEQ ID NO: 19856 - protein, 833 aa, Escherichia coli
MYKKLKLTTISELIKNIYCSLSVIIIGCASAYAVEFNKDLIEAEDRENVNLSQFETDGQLPVGKYSLSTLINNKRTPIHLDLQWVLIDNQTAVCLTPEQLTLLGFTDEIIEEAQQNLIDGCYPIEKEKQITTYLDKGKMQLSISAPQAWLKYKDANWTPPELWDHGIAGAFLDYNLYASHYAPHQGDNSQNISSYGQAGVNLGAWRLRTDYQYDQSFNNGKSQANNLDFPRIYLFRPIPEINAKLTIGQYDTESSIFDSFHFSGISLKSDENMLPPDLRGYAPQITGVAQTNAKVTVSQNNRIIYQENVPPGPFSITNLFNTLQGQLDVKVEEEDGRVTQWQVASNSIPYLTRKGQIRYTTAMGKPTSVGGDSLQQPFFWTGEFSWGWLNNVSLYGGSVLTNRDYQSLATGVGFNLNSLGSLSFDVTRSDAQLHNQNKETGYSYRANYSKRFESTGSQLTFAGYRFSDKNFVSMNEYINDTNHYTNYQNEKESYIVTFNQYLESLRLNTYVSLARNTYWDASSNVNYSLSLSRDFDIGPLKNVSTSLTFSRINWEDDNQDQLYLNISIPWGTSRTLSYGMQRNQDNNISHTASWYDSSDRNNSWSVSASGDNDEFKDMEASLRASYQHNTENGRLYLSGTSQRDSYYSLNASWNGSFTATRHGAAFHDYSGSADSRFMIDADGAEDIQLNNKRAVTNRYGIGVIPSVSSYITTSLSVDTRNLPENVDIENSVITTTLTEGAIGYAKLDTRKGYQIMGIIRLADGSHPPLGISVKDETSHKELGLVADGGFVYLNGIQDDSKITLHWGDKSCFIQPPPNSSNLTTGTVILPCIS

SEQ ID NO: 19857 - protein, 897 aa, Escherichia coli; identical to SEQ ID NO: 9741

SEQ ID NO: 19858 - protein, 838 aa, Escherichia coli
MPQRHHQGHKRTPKQLALIIKRCLPMVLTGSGMLCTTANAEEYYFDPIMLETTKSGMQTTDLSRFSKKYAQLPGTYQVDIWLNKKKVSQKKITFTANAEQLLQPQFTVEQLRELGIKVDEIPALAEKDDDSVINSLEQIIPGTAAEFDFNHQRLNLSIPQIALYRDARGYVSPSRWDDGIPTLFTNYSFTGSDNCYRQGNRSQRQYLNMQNGANFGPWRLRNYSTWTRNDQTSSWNTISSYLQRDIKALKSQLLLGESATSGSIFSSYTFTGVQLASDDNMLPNSQRGFAPTVRGIANSSAIVTIRQNGYVIYQSNVPAGAFEINDLYPSSNSGDLEVTIEESDGTQRRFIQPYSSLPMMQRPGHLKYSATAGRYRADANSDSKEPEFAEATAIYGLNNTFTLYGGLLGSEDYYALGIGIGGTLGALGALSMDINRADTQFDNQHSFHGYQWRTQYIKDIPETNTNIAVSYYRYTNDGYFSFDEANTRNWNYNSRQKSEIQFNISQTIFDGVSLYASGSQQDYWGNNDKNRNISVGVSGQQWGVGYSLNYQYSRYTDQNNDRALSLNLSIPLERWLPRSRVSYQMTSQKDRPTQHEMRLDGSLLDDGRLSYSLEQSLDDDNNHNSSLNASYRSPYGTFSAGYSYGNDSSQYNYGVTGGVVIHPHGVTLSQYLGNAFALIDANGASGVRIQNYPGIATDPFGYAVVPYLTTYQENRLSVDTTQLPDNVDLEQTTQFVVPNRGAMVAARFNANIGYRVLVTVSDRNGKPLPFGALASNDETGQQSIVDEGGILYLSGISSKSQSWTVRWGNQADQQCQFAFSTPDSEPTTSVLQGTAQCH

SEQ ID NO: 19859 - protein, 233 aa, Escherichia coli
MKTCITKGIVTVSLTAILLSCSSAWAAGKGGIGLAATRLVYSEGEEQISLGVRNTSPDVSYLIQSWVMTPDNKKSADFIITPPLFVLNPANENLLRIMYIGAPLAKDRETLFFTSVRAVPSTTKREEGNTLKIATQSVIKLFWRPKGLAYPLAEAPAKLRCTSSADMVTVSNPTPYFITLTDLKIGGKVVKNQMISPFDKYQFSLPKGAKNSSVTYRTINDYGAETPQLNCKS

SEQ ID NO: 19860 - protein, 191 aa, Escherichia coli; identical to SEQ ID NO: 13750

SEQ ID NO: 19861 - protein, 213 aa, Escherichia coli; identical to SEQ ID NO: 2232

SEQ ID NO: 19862 - protein, 246 aa, Escherichia coli; identical to SEQ ID NO: 9522

SEQ ID NO: 19863 - protein, 224 aa, Escherichia coli; identical to SEQ ID NO: 4515

SEQ ID NO: 19864 - protein, 686 aa, Escherichia coli
MFWRDITLSVWRKKTTGLKTKKRLLPLVLAAALCSSPVWAEEATFTANFKDTDLKSFIETVGANLNKTIIMGPGVQGKVSIRTMTPLNERQYYQLFLNLLEAQGYAVVPMENDVLKVVKSSAAKVEPLPLVGEGSDNYAGDEMVTKVVPVRNVSVRELAPILRQMIDSAGSGNVVNYDPSNVIMLTGRASVVERLTEVIQSVDHAGNRTEEVIPLDNASASEIARVLESLTKNSGENQPATLKSQIVADERTNSVIVSGDPATRDKMRRLIRRLDSEMERSGNSQVFYLKYSKAEDLVDVLKQVSGTLTAAKEEAEGTVGSGREIVSIAASKHSNALIVTAPQDIMQSLQSVIEQLDIRRAQVHVEALIVEVAEGSNINFGVQWASKDAGLMQFANGTQIPIGTLGAAISQAKPQKGSTVISENGATTINPDTNGDLSTLAQLLSGFSGTAVGVVKGDWMALVQAVKNDSSSNVLSTPSITTLDNQEAFFMVGQDVPVLTGSTVGSNNSNPFNTVERKKVGIMLKVTPQINEGNAVQMVIEQEVSKVEGQTSLDVVFGERKLKTTVLANDGELIVLGGLMDDQAGESVAKVPLLGDIPLIGNLFKSTADKKEKRNLMVFIRPTILRDGMAADGVSQRKYNYMRAEQIYRDEQGLSLMPHTAQPVLPAQNQALPPEVRAFLNAGRTR

SEQ ID NO: 19865 - protein, 245 aa, Escherichia coli; identical to SEQ ID NO: 5820

SEQ ID NO: 19866 - protein, 729 aa, Escherichia coli; identical to SEQ ID NO: 3979

SEQ ID NO: 19867 - protein, 362 aa, Escherichia coli; identical to SEQ ID NO: 5812

SEQ ID NO: 19868 - protein, 208 aa, Escherichia coli; identical to SEQ ID NO: 1949

SEQ ID NO: 19869 - protein, 249 aa, Escherichia coli
MRYLNTKNIIAAGVLLSCMNSIAWGAIIPDRTRIIMNESDKGEALKLTNQSKKLPYLAQTWIEDTKGNKSRDFIVTVPPMVRLNPNEQIQIRMITQEKIAQLPKDRETLFYFNVREIPPKTDKKNVMQVTMQHALKLFWRPKAIELEDDGVMTYEKVEIIRRNDGSIRFNNKMPYHVTLGYIGTNGVTMLPQTQSLMVLPFSHADTQFKNVPSTFQVGYINDFGGLSFYEINCPTVNNSCNVSVAKRDK

SEQ ID NO: 19870 - protein, 746 aa, Escherichia coli
MNKKIHSLALLVNLGIYGVAQAQEPTDTPVSHDDTIVVTAAEQNLQAPGVSTITADEIRKNPVARDVSEIIRTMPGVNLTGNSTSGQRGNNRQIDIRGMGPENTLILIDGKPVSSRNSVRQGWRGERDTRGDTSWVPPEMIERIEVLRGPAAARYGNGAAGGVVNIITKKGSGEWHGSWDAYFNAPEHKEEGATKRTNFSLTGPLGDEFSFRLYGNLDKTQADAWDINQGHQSARAGTYATTLPAGREGVINKDINGVVRWDFAPLQSLELEAGYSRQGNLYAGDTQNTNSDSYTRSKYGDETNRLYRQNYALTWNGGWDNGVTTSNWVQYEHTRNSRIPEGLAGGTEGKFNEKATQDFVDIDLDDVMLHSEVNLPIDFLVNQTLTLGTEWNQQRMKDLSSNTQVLTGTNTGGAIDGVSATDRSPYSKAEIFSLFAENNMELTDSTIVTPGLRFDHHSIVGNNWSPALNISQGLGDDFTLKMGIARAYKAPSLYQTNPNYILYSKGQGCYASAGGCYLQGNDDLKAETSINKEIGLEFKRDGWLAGVTWFRNDYRNKIEAGYVAVGQNAVGTDLYQWDNVPKAVVEGLEGSLNVPVSETVMWTNNITYMLKSENKTTGDRLSIIPEYTLNSTLSWQAREDLSMQTTFTWYGKQQPKKYNYKGQPAVGPETKEISPYSIVGLSATWDVTKNVSLTGGVDNLFDKRLWRAGNAQTTGDLAGANYIAGAGAYTYNEPGRTWYMSVNTHF

SEQ ID NO: 19871 - protein, 351 aa, Escherichia coli; identical to SEQ ID NO: 4165

SEQ ID NO: 19872 - protein, 67 aa, Escherichia coli
MYNNGNYHYTNKDLVKYVEVGATYYFNKNMSTYVDYKINLLDNDDDFYANNGIATDDIVAVGLVYQF

SEQ ID NO: 19873 - protein, 729 aa, Escherichia coli; identical to SEQ ID NO: 5961

SEQ ID NO: 19874 - protein, 654 aa, Escherichia coli
MDCVMKGLNKITCCLLAALLMPCAGHAENEQYGANFNNADIRQFVEIVGQHLGKTILIDPSVQGTISVRSNDTFSQQEYYQFFLSILDLYGYSVITLDNGFLRVVRSANVKTSPGMIADSSRPGVGDELVTRIVPLENVPARDLAPLLRQMMDAGSVGNVVHYEPSNVLILTGRASTINKLIEVIKRVDVIGTEKQQIIHLEYASAEDLAEILNQLISESHGKSQMPALLSARIVADKRTNSLIISGPEKARQRITSLLKSLDVEESEEGNTRVYYLKYAKATNLVEVLTGVSEKLKDEKGNARKPSSSGAMDNVAITADEQTNSLVITADQSVQEKLATVIARLDIRRAQVLVEAIIVEVQDGNGLNLGVQWANKNVGAQQFTNTGLPIFNAAQGVADYKKNGGITSANPAWDMFSAYNGMAAGFFNGDWGVLLTALASNNKNDILATPSIVTLDNKLASFNVGQDVPVLSGSQTTSGDNVFNTVERKTVGTKLKVTPQVNEGDAVLLEIEQEVSSVDSSSNSTLGPTFNTRTIQNAVLVKTGETVVLGGLLDDFSKEQVSKVPLLGDIPLVGQLFRYTSTERAKRNLMVFIRPTIIRDDDVYRSLSKEKYTRYLQEQQQRIDGKSKALVGSEDLPVLDENTFNSHAPAPSSR

SEQ ID NO: 19875 - protein, 784 aa, Escherichia coli; identical to SEQ ID NO: 2244

SEQ ID NO: 19876 - protein, 118 aa, Escherichia coli [sequence omitted]

SEQ ID NO: 19877 - protein, 111 aa, Escherichia coli; identical to SEQ ID NO: 2911

SEQ ID NO: 19878 - protein, 250 aa, Escherichia coli; identical to SEQ ID NO: 5817

SEQ ID NO: 19879 - protein, 243 aa, Escherichia coli
MTFMKGLPLLLLVASLCSHAALQPDRTRIVFNANDKATSLRVDNRSDKLPYLAYSWLENEKGEKSDDLLVALPPIQRLEPKATTQVRIVKQASTAKLPGDRETLFFYNIREVPPAPEKNSDHAVLQVAIQSRIKVFWRPAALRKKAGEKVELQLQVSQQGNQLTLKNPTAYYLTIAYLGRNEKGVLPGFKTVMVAPFSTVNTNTGSYSGSQFYLGYMDDYGALRMTMLNCSGQCHLQAVEAKK

SEQ ID NO: 19880 - protein, 760 aa, Escherichia coli; identical to SEQ ID NO: 2080

SEQ ID NO: 19881 - protein, 368 aa, Escherichia coli; identical to SEQ ID NO: 5797

SEQ ID NO: 19882 - protein, 241 aa, Escherichia coli; identical to SEQ ID NO: 2884

SEQ ID NO: 19883 - protein, 412 aa, Escherichia coli; identical to SEQ ID NO: 8543

SEQ ID NO: 19884 - protein, 678 aa, Escherichia coli
MVPSTFSRLKAARCLPVVLAALIFAGCGTHTPDQSTAYMQGTAQADSAFYLQQMQQSSDDTRINWQLLAIRALVKEGKTGQAVELFNQLPQELNDAQRREKTLLAVEIKLAQKDFAGAQNLLAKITPADLEQNQQARYWQAKIDASQGRPSIDLLRALIAQEPLLGAKEKQQNIDATWQALSSMTQEQANMLVINADENILQGWLDLQRVWFDNRNDPDMMKAGIADWQKRYPNNPGAKMLPTQLVNVKAFKPASTNKIALLLPLNGQAAVFGRTIQQGFEAAKNIGTQPVAAQVAAAPAADVAEQPQPQTVDGVASPAQASVSDLTGEQPAAQPVPVSAPATSTAAVSAPANPSAELKIYDTSSQPLSQILSQVQQDGASIVVGPLLKNNVEELLKSNTPLNVLALNQPENIENRVNICYFALSPEDEARDAARHIRDQGKQAPLVLIPRSSLGDRVANAFAQEWQKLGGGTVLQQKFGSTSELRAGVNGGSGIALTGSPITLRATTDSGMTTNNPTLQTTPTDDQFTNNGGRVDAVYIVATPGEIAFIKPMIAMRNGSQSGATLYASSRSAQGTAGPDFRLEMEGLQYSEIPMLAGGNLPLMQQALSAVNNDYSLARMYAMGVDAWSLANHFSQMRQVQGFEINGNTGSLTANPDCVINRKLSWLQYQQGQVVPVS

SEQ ID NO: 19885 - protein, 700 aa, Escherichia coli; identical to SEQ ID NO: 19684

SEQ ID NO: 19886 - protein, 230 aa, Escherichia coli; identical to SEQ ID NO: 5808

SEQ ID NO: 19887 - protein, 663 aa, Escherichia coli; identical to SEQ ID NO: 1910

SEQ ID NO: 19888 - protein, 231 aa, Escherichia coli; identical to SEQ ID NO: 5780

SEQ ID NO: 19889 - protein, 207 aa, Escherichia coli; identical to SEQ ID NO: 2211

SEQ ID NO: 19890 - protein, 838 aa, Escherichia coli; identical to SEQ ID NO: 8135

SEQ ID NO: 19891 - protein, 843 aa, Escherichia coli; identical to SEQ ID NO: 3163

SEQ ID NO: 19892 - protein, 883 aa, Escherichia coli; identical to SEQ ID NO: 3379

SEQ ID NO: 19893 - protein, 161 aa, Escherichia coli; identical to SEQ ID NO: 2582

SEQ ID NO: 19894 - protein, 880 aa, Escherichia coli; identical to SEQ ID NO: 3110

SEQ ID NO: 19895 - protein, 237 aa, Escherichia coli; identical to SEQ ID NO: 1814

SEQ ID NO: 19896 - protein, 834 aa, Escherichia coli; identical to SEQ ID NO: 3095

SEQ ID NO: 19897 - protein, 266 aa, Escherichia coli; identical to SEQ ID NO: 1894

SEQ ID NO: 19898 - protein, 878 aa, Escherichia coli
MSYLNLRLYQRNTQCLHIRKHRLAGFFVRLFVACAFAAQAPLSSAELYFNPRFLADDPQAVADLSRFENGQELPPGTYRVDIYLNNGYMATRDVTFNTGDSEQGIVPCLTRAQLASMGLNTASVSGMNLLADDACVPLTTMIQDATAHLDVGQQRLNLTIPQAFMSNRARGYIPPELWDPGINAGLLNYNFSGNSVQNRIGGNSHYAYLNLQSGLNIGAWRLRDNTTWSYNSSDRSSGSKNKWQHINTWLERDIIPLRSRLTLGDGYTQGDIFDGINFRGAQLASDDNMLPDSQRGFAPVIHGIARGTAQVTIKQNGYDIYNSTVPPGPFTINDIYAAGNSGDLQVTIKEADGSTQIFTVPYSSVPLLQREGHTRYSITAGEYRSGNAQQEKPRFFQSTLLHGLPAGWTIYGGTQLADRYRAFNFGIGKNMGALGALSVDMTQANSTLPDDSQHDGQSVRFLYNKSLNESGTNIQLVGYRYSTSGYFNFADTTYSRMNGYNIETQDGVIQVKPKFTDYYNLAYNKRGKLQLTVTQQLGRTSTLYLSGSHQTYWGTSNVDEQFQAGLNTAFEDINWTLSYSLTKNAWQKGRDQMLALNVNIPFSHWLRSDSKSQWRHASASYSMSHDLNGRMTNLAGVYGTLLEDNNLSYSVQTGYAGGGDGNSGSTGYATLNYRGGYGNANIGYSHSDDIKQLYYGVSGGVLAHANGVTLGQPLNDTVVLVKAPGAKDAKVENQTGVRTDWRGYAVLPYATEYRENRVALDTNTLADNVDLDNAVANVVPTRGAIVRAEFKARVGIKLLMTLTHNNKPLPFGAMVTSESSQSSGIVADNGQVYLSGMPLAGKVQVKWGEEENAHCVANYQLPPESQQQLLTQLSAECR

SEQ ID NO: 19899 - protein, 866 aa, Escherichia coli; identical to SEQ ID NO: 8338

SEQ ID NO: 19900 - protein, 820 aa, Escherichia coli; identical to SEQ ID NO: 8131

SEQ ID NO: 19901 - protein, 826 aa, Escherichia coli; identical to SEQ ID NO: 7491

SEQ ID NO: 19902 - protein, 368 aa, Escherichia coli; identical to SEQ ID NO: 3872

SEQ ID NO: 19903 - protein, 191 aa, Escherichia coli
MKKSLIGLTFASLMFSAGSAVAADYKIDKEGQHAFVNFRIQHLGYSWLYGTFKDFDGTFTFDEKNPAADKVNVTINTTSVDTNHAERDKHLRSADFLNTAKYPQATFTSTSVKKDGDELDITGDLTLNGVTKPVTLEAKLIGQGDDPWGGKRAGFEAEGKIKLKDFNIKTDLGPASQEVDLIISVEGVQQK

SEQ ID NO: 19904 - protein, 232 aa, Escherichia coli; identical to SEQ ID NO: 2087

SEQ ID NO: 19905 - protein, 662 aa, Escherichia coli; identical to SEQ ID NO: 8124

SEQ ID NO: 19906 - protein, 204 aa, Escherichia coli; identical to SEQ ID NO: 2957

SEQ ID NO: 19907 - protein, 231 aa, Escherichia coli; identical to SEQ ID NO: 7365

SEQ ID NO: 19908 - protein, 170 aa, Escherichia coli [sequence omitted]

SEQ ID NO: 19909 - protein, 243 aa, Escherichia coli; identical to SEQ ID NO: 3483

SEQ ID NO: 19910 - protein, 230 aa, Escherichia coli; identical to SEQ ID NO: 3019

SEQ ID NO: 19911 - protein, 365 aa, Escherichia coli; identical to SEQ ID NO: 3878

SEQ ID NO: 19912 - protein, 551 aa, Escherichia coli; identical to SEQ ID NO: 2446

SEQ ID NO: 19913 - protein, 746 aa, Escherichia coli; identical to SEQ ID NO: 8398

SEQ ID NO: 19914 - protein, 233 aa, Escherichia coli; identical to SEQ ID NO: 3276

SEQ ID NO: 19915 - protein, 102 aa, Escherichia coli
MKKVLALVVAAAMGLSSAAFAAETANTPAPTATTTKAAPAKTTHHKKQHKAAPAQKAQAAKKHHKNTKAEQKAPEQKAQAAKKHAGKHSHQQPAKPAAQPAA

SEQ ID NO: 19916 - protein, 565 aa, Escherichia coli; identical to SEQ ID NO: 2678

SEQ ID NO: 19917 - protein, 614 aa, Escherichia coli; identical to SEQ ID NO: 1884

SEQ ID NO: 19918 - protein, 236 aa, Escherichia coli; identical to SEQ ID NO: 3438

SEQ ID NO: 19919 - protein, 359 aa, Escherichia coli; identical to SEQ ID NO: 2328

SEQ ID NO: 19920 - protein, 231 aa, Escherichia coli; identical to SEQ ID NO: 3055

SEQ ID NO: 19921 - protein, 224 aa, Escherichia coli
MKGLLSLLIFSMVLPAHAGIVIYGTRIIYPAENKEVMVQLMNQGNRSSLLQAWIDDGDTSLPPEKIQVPFMLTPPVAKIGANSGQQVKIKIMPNKLPTNKESIFYLNVLDIPPNSPEQEGKNALKFAMQNRIKLFYRPAGIAPVNKATFKKLLVNRSDNGLVIKNDSANWVTISDVKANNVKVNYETIMIAPLESQSVNVKSNNANNWYLTIIDDHGNYISDKI

SEQ ID NO: 19922 - protein, 208 aa, Escherichia coli; identical to SEQ ID NO: 1949

SEQ ID NO: 19923 - protein, 246 aa, Escherichia coli; identical to SEQ ID NO: 3021

SEQ ID NO: 19924 - protein, 446 aa, Escherichia coli; identical to SEQ ID NO: 5547

SEQ ID NO: 19925 - protein, 203 aa, Escherichia coli; identical to SEQ ID NO: 2009

SEQ ID NO: 19926 - protein, 512 aa, Escherichia coli; identical to SEQ ID NO: 2974

SEQ ID NO: 19927 - protein, 478 aa, Escherichia coli; identical to SEQ ID NO: 7448

SEQ ID NO: 19928 - protein, 656 aa, Escherichia coli
MFRKWLNGRLSIFVFTTVFLSAIPGWGAEFSASFKDTDIQEFINTVSKNLHKTVIINPDVQGTITVRSYDMLNEEQYYQFFLSVLDVYGFAVVDMHNGILKVVRSKDAKTSAVPVASDASPGTGDEVVTRVVPVSNVAARDLAPLLRQLNDNAGAGSVVHYEPSNVLLMTGRAAVVKRLMEIVERVDKEGNRSVATVPLTYASATDVARLVTELTKESDKTAMPAWMTAKLVADERTNSVLVSGEPISQQRIISMIKQLDRKEDVQGNTKVIYLKYAKAKDLVEVLTGISSNIENDAKKSSSTEALRKGVTIKSHEQTNALILTGAPDVIRDLENVISQLDIRRPQVLVEAIIAEVQDADGLNLGIQWVNKHSGVTQFTSTGLPITTMVQTRQSDISDSDQSNTLSMFNGIAAGFYQGNWAMLLTALSTSSKNDILATPSIVTLDNMEATFNVGQEVPVLSGSQTTSGDNIFNTVERKTVGIKLRVKPQINEGDSVLLEIEQEVSGVADTAVATTTDLGATFNTRTVTNAMLVGNGETVVVGGLLDKSIRGSESKVPLLGDIPVLGHLFSSKSEHAAKRNLMLFIRPTIIRERDGFRHASAEKYLSFNQEQVQSRGKETMALTLNEEQLKLSRDRDDTTFRKVKTAIAAFYARGMQ

SEQ ID NO: 19929 - protein, 663 aa, Escherichia coli
MFRLNPFVRVGLCLSAISCAWPVLAVDDDGETMVVTASSVEQNLKDAPASISVITQEDLQRKPVQNLKDVLKEVPGVQLTNEGDNRKGVSIRGLDSSYTLILVDGKRVNSRNAVFRHNDFDLNWIPVDSIERIEVVRGPMSSLYGSDALGGVVNIITKKIGQKWSGTVTVDTTIQEHRDRGDTYNGQFFTSGPLIDGVLGMKAYGSLAKREKDDPQNSTTTDTGETPRIEGFSSRDGNVEFAWTPNQNHDFTAGYGFDRQDRDSDSLDKNRLERQNYSVSHNGRWDYGTSELKYYGEKVENKNPGNSSPITSESNTVDGKYTLPLTAINQFLTVGGEWRHDKLSDAVNLTGGTSSKTSASQYALFVEDEWRIFEPLALTTGVRMDDHETYGEHWSPRAYLVYNATDTVTVKGGWATAFKAPSLLQLSPDWTSNSCRGACKIVGSPDLKPETSESWELGLYYMGEEGWLEGVESSVTVFRNDVKDRISISRTSDVNAAPGYQNFVGFETGANGRRIPVFSYYNVNKARIQGVETELKIPFNDEWKLSINYTYNDGRDVSNGENKPLSDLPFHTANGTLDWKPLALEDWSFYVSGQYTGQKRADSATAKTPGGYTIWNTGAAWQVTKDVKLRAGVLNLGDKDLSRDDYSYNEDGRRYFMAVDYRF

SEQ ID NO: 19930 - protein, 274 aa, Escherichia coli; identical to SEQ ID NO: 3471

SEQ ID NO: 19931 - protein, 760 aa, Escherichia coli; identical to SEQ ID NO: 3923

SEQ ID NO: 19932 - protein, 362 aa, Escherichia coli; identical to SEQ ID NO: 2434

SEQ ID NO: 19933 - protein, 162 aa, Escherichia coli; identical to SEQ ID NO: 1973

SEQ ID NO: 19934 - protein, 228 aa, Escherichia coli
MKRISFAVLALLMTAQQCFAGGVALSTTRVIYDGGKKEASLTVENHNKNEEFLIQSWIDDVNSNKKTPFIITPPLFKLDPDKNNVLRIVNIEDTLPKDRESVYWINVKAIPAKSAENENKNVLQIAVRTRLKLFYRPKGLPGSNLEAMKQLRFQRQNNQIVVNNDSAYNLTFNQFSINGQKIERAGMVLAKGKLNINLPAGTGNAHEVKYSIINDFGVTGEMLTKPIN

SEQ ID NO: 19935 - protein, 89 aa, Escherichia coli; identical to SEQ ID NO: 2833

SEQ ID NO: 19936 - protein, 213 aa, Escherichia coli; identical to SEQ ID NO: 2232

SEQ ID NO: 19937 - protein, 236 aa, Escherichia coli; identical to SEQ ID NO: 3482

SEQ ID NO: 19938 - protein, 430 aa, Escherichia coli; identical to SEQ ID NO: 2617

SEQ ID NO: 19939 - protein, 365 aa, Escherichia coli; identical to SEQ ID NO: 2102

SEQ ID NO: 19940 - protein, 998 aa, Escherichia coli; identical to SEQ ID NO: 8351

SEQ ID NO: 19941 - protein, 193 aa, Escherichia coli; identical to SEQ ID NO: 2246

SEQ ID NO: 19942 - protein, 367 aa, Escherichia coli; identical to SEQ ID NO: 4285

SEQ ID NO: 19943 - protein, 200 aa, Escherichia coli; identical to SEQ ID NO: 1784

SEQ ID NO: 19944 - protein, 412 aa, Escherichia coli; identical to SEQ ID NO: 4058

SEQ ID NO: 19945 - protein, 729 aa, Escherichia coli; identical to SEQ ID NO: 2948

SEQ ID NO: 19946 - protein, 747 aa, Escherichia coli; identical to SEQ ID NO: 2072

SEQ ID NO: 19947 - protein, 511 aa, Escherichia coli; identical to SEQ ID NO: 2457

SEQ ID NO: 19948 - protein, 89 aa, Escherichia coli; identical to SEQ ID NO: 2810

SEQ ID NO: 19949 - protein, 407 aa, Escherichia coli
MTERELSIIRALGEEFSTVLADLQCTFEGKMAAQAQAFEEKLASLSAVLQKHVTVDEVRPVLQAMVDDAVGGIPVPRDGRDYDPEVLQQAVNDAVAKIPVPADGKSITPDDVRPMLEQMVKEAVSHIPAPRDGRDYDPEVLKLAVNDAVAKIPVPADGKSLTPDDVRPMLEQMVKEAVSHIPVPRDGRDYDPEVLQKAVNDAVANIPQPADGKSLTPDDVRPMLEQMVKEAVSHIPVPRDGRDYDPDVLQKAVLDAVSALPAPQDGRDATALEILPAIDDQKSFPRGTYATHQGGLWRAYEKTHGMRGWECLVDGVADIDVSMTGERLFSVVVRQSSGQRTEKTFSLPVMLYRGVFRAGETYHPGDTVTWGGSLWHCNSMTADKPGDAHASGWTLAAKRGRDAGGGK

SEQ ID NO: 19950 - protein, 784 aa, Escherichia coli; identical to SEQ ID NO: 2244

SEQ ID NO: 19951 - protein, 828 aa, Escherichia coli; identical to SEQ ID NO: 2388

SEQ ID NO: 19952 - protein, 700 aa, Escherichia coli; identical to SEQ ID NO: 8081

SEQ ID NO: 19953 - protein, 351 aa, Escherichia coli; identical to SEQ ID NO: 2872

SEQ ID NO: 19954 - protein, 432 aa, Escherichia coli; identical to SEQ ID NO: 2026

SEQ ID NO: 19955 - protein, 241 aa, Escherichia coli; identical to SEQ ID NO: 2922

SEQ ID NO: 19956 - protein, 334 aa, Escherichia coli; identical to SEQ ID NO: 2756

SEQ ID NO: 19957 - protein, 250 aa, Escherichia coli; identical to SEQ ID NO: 3048

SEQ ID NO: 19958 - protein, 472 aa, Escherichia coli; identical to SEQ ID NO: 7769

SEQ ID NO: 19959 - protein, 332 aa, Escherichia coli; identical to SEQ ID NO: 2703

SEQ ID NO: 19960 - protein, 878 aa, Escherichia coli; identical to SEQ ID NO: 12145

SEQ ID NO: 19961 - protein, 862 aa, Escherichia coli; identical to SEQ ID NO: 19460

SEQ ID NO: 19962 - protein, 260 aa, Escherichia coli; identical to SEQ ID NO: 4546

SEQ ID NO: 19963 - protein, 266 aa, Escherichia coli; identical to SEQ ID NO: 1893

SEQ ID NO: 19964 - protein, 229 aa, Escherichia coli; identical to SEQ ID NO: 9651

SEQ ID NO: 19965 - protein, 884 aa, Escherichia coli; identical to SEQ ID NO: 14714

SEQ ID NO: 19966 - protein, 334 aa, Escherichia coli; identical to SEQ ID NO: 2751

SEQ ID NO: 19967 - protein, 883 aa, Escherichia coli; identical to SEQ ID NO: 9639

SEQ ID NO: 19968 - protein, 831 aa, Escherichia coli; identical to SEQ ID NO: 12096

SEQ ID NO: 19969 - protein, 840 aa, Escherichia coli; identical to SEQ ID NO: 9665

SEQ ID NO: 19970 - protein, 828 aa, Escherichia coli; identical to SEQ ID NO: 2388

SEQ ID NO: 19971 - protein, 900 aa, Escherichia coli; identical to SEQ ID NO: 9699

SEQ ID NO: 19972 - protein, 161 aa, Escherichia coli; identical to SEQ ID NO: 2582

SEQ ID NO: 19973 - protein, 892 aa, Escherichia coli; identical to SEQ ID NO: 19435

SEQ ID NO: 19974 - protein, 715 aa, Escherichia coli; identical to SEQ ID NO: 5610

SEQ ID NO: 19975 - protein, 231 aa, Escherichia coli; identical to SEQ ID NO: 2864

SEQ ID NO: 19976 - protein, 725 aa, Escherichia coli; identical to SEQ ID NO: 2870

SEQ ID NO: 19977 - protein, 656 aa, Escherichia coli; identical to SEQ ID NO: 2901

SEQ ID NO: 19978 - protein, 224 aa, Escherichia coli; identical to SEQ ID NO: 3792

SEQ ID NO: 19979 - protein, 193 aa, Escherichia coli; identical to SEQ ID NO: 2246

SEQ ID NO: 19980 - protein, 663 aa, Escherichia coli; identical to SEQ ID NO: 9256

SEQ ID NO: 19981 - protein, 332 aa, Escherichia coli; identical to SEQ ID NO: 2714

SEQ ID NO: 19982 - protein, 760 aa, Escherichia coli; identical to SEQ ID NO: 9855

SEQ ID NO: 19983 - protein, 246 aa, Escherichia coli; identical to SEQ ID NO: 3838

SEQ ID NO: 19984 - protein, 752 aa, Escherichia coli; identical to SEQ ID NO: 19677

SEQ ID NO: 19985 - protein, 663 aa, Escherichia coli; identical to SEQ ID NO: 19617

SEQ ID NO: 19986 - protein, 565 aa, Escherichia coli; identical to SEQ ID NO: 2674

SEQ ID NO: 19987 - protein, 713 aa, Escherichia coli; identical to SEQ ID NO: 4590

SEQ ID NO: 19988 - protein, 222 aa, Escherichia coli; identical to SEQ ID NO: 1956

SEQ ID NO: 19989 - protein, 249 aa, Escherichia coli; identical to SEQ ID NO: 9840

SEQ ID NO: 19990 - protein, 673 aa, Escherichia coli; identical to SEQ ID NO: 2919

SEQ ID NO: 19991 - protein, 209 aa, Escherichia coli; identical to SEQ ID NO: 19636

SEQ ID NO: 19992 - protein, 431 aa, Escherichia coli; identical to SEQ ID NO: 3408

SEQ ID NO: 19993 - protein, 380 aa, Escherichia coli; identical to SEQ ID NO: 19678

SEQ ID NO: 19994 - protein, 274 aa, Escherichia coli; identical to SEQ ID NO: 2301

SEQ ID NO: 19995 - protein, 250 aa, Escherichia coli; identical to SEQ ID NO: 9904

SEQ ID NO: 19996 - protein, 214 aa, Escherichia coli; identical to SEQ ID NO: 19448

SEQ ID NO: 19997 - protein, 746 aa, Escherichia coli; identical to SEQ ID NO: 4597

SEQ ID NO: 19998 - protein, 478 aa, Escherichia coli; identical to SEQ ID NO: 2405

SEQ ID NO: 19999 - protein, 259 aa, Escherichia coli; identical to SEQ ID NO: 12016

SEQ ID NO: 20000 - protein, 700 aa, Escherichia coli; identical to SEQ ID NO: 12225

SEQ ID NO: 20001 - protein, 162 aa, Escherichia coli; identical to SEQ ID NO: 1965

SEQ ID NO: 20002 - protein, 239 aa, Escherichia coli; identical to SEQ ID NO: 14867

SEQ ID NO: 20003 - protein, 237 aa, Escherichia coli; identical to SEQ ID NO: 19633

SEQ ID NO: 20004 - protein, 360 aa, Escherichia coli; identical to SEQ ID NO: 3862

SEQ ID NO: 20005 - protein, 204 aa, Escherichia coli; identical to SEQ ID NO: 2957

SEQ ID NO: 20006 - protein, 241 aa, Escherichia coli; identical to SEQ ID NO: 2075

SEQ ID NO: 20007 - protein, 432 aa, Escherichia coli; identical to SEQ ID NO: 2026

SEQ ID NO: 20008 - protein, 696 aa, Escherichia coli; identical to SEQ ID NO: 5576

SEQ ID NO: 20009 - protein, 733 aa, Escherichia coli; identical to SEQ ID NO: 9713

SEQ ID NO: 20010 - protein, 375 aa, Escherichia coli; identical to SEQ ID NO: 2432

SEQ ID NO: 20011 - protein, 660 aa, Escherichia coli; identical to SEQ ID NO: 5588

SEQ ID NO: 20012 - protein, 412 aa, Escherichia coli; identical to SEQ ID NO: 9906

SEQ ID NO: 20013 - protein, 191 aa, Escherichia coli; identical to SEQ ID NO: 2728

SEQ ID NO: 20014 - protein, 265 aa, Escherichia coli; identical to SEQ ID NO: 19451

SEQ ID NO: 20015 - protein, 353 aa, Escherichia coli; identical to SEQ ID NO: 6704

SEQ ID NO: 20016 - protein, 517 aa, Escherichia coli; identical to SEQ ID NO: 2462

SEQ ID NO: 20017 - protein, 446 aa, Escherichia coli; identical to SEQ ID NO: 2177

SEQ ID NO: 20018 - protein, 784 aa, Escherichia coli; identical to SEQ ID NO: 2241

SEQ ID NO: 20019 - protein, 122 aa, Escherichia coli; identical to SEQ ID NO: 2915

SEQ ID NO: 20020 - protein, 551 aa, Escherichia coli; identical to SEQ ID NO: 2452

SEQ ID NO: 20021 - protein, 208 aa, Escherichia coli; identical to SEQ ID NO: 1948

SEQ ID NO: 20022 - protein, 654 aa, Escherichia coli; identical to SEQ ID NO: 3854

SEQ ID NO: 20023 - protein, 360 aa, Escherichia coli; identical to SEQ ID NO: 3354

SEQ ID NO: 20024 - protein, 366 aa, Escherichia coli; identical to SEQ ID NO: 2115

SEQ ID NO: 20025 - protein, 614 aa, Escherichia coli; identical to SEQ ID NO: 6666

SEQ ID NO: 20026 - protein, 686 aa, Escherichia coli; identical to SEQ ID NO: 4535

SEQ ID NO: 20027 - protein, 729 aa, Escherichia coli; identical to SEQ ID NO: 4557

SEQ ID NO: 20028 - protein, 362 aa, Escherichia coli; identical to SEQ ID NO: 4554

SEQ ID NO: 20029 - protein, 237 aa, Escherichia coli; identical to SEQ ID NO: 3605

SEQ ID NO: 20030 - protein, 826 aa, Escherichia coli; identical to SEQ ID NO: 3772

SEQ ID NO: 20031 - protein, 866 aa, Escherichia coli; identical to SEQ ID NO: 3688

SEQ ID NO: 20032 - protein, 880 aa, Escherichia coli
MPDHSLFRLRILPWCIALAMSGSYSSVWAEDDIQFDSRFLELKGDTKIDLKRFSSQGYVEPGKYNLQVQLNKQPLAEEYDIYWYAGEDDASKSYACLTPELVAQFGLKEDVAKNLQWSHDAKCLKSGQLEGMEIKADLSQSALVISLPQAYLEYTYPDWDPPSRWDDGISGIVADYSINAQTRHEENGGDDSNEISGNGTVGVNLGPWRMRADWQTNYQHTRSNDDDEFSGDETQKKWEWSRYYAWRALPSLKAKLALGEDYLRSDIFDGFNYVGGSVSTDDQMLPPNLRGYAPDISGVAHTTAKVTVSQMGRVIYETQVPAGPFRIQDLGDSVSGTLHIRIEEQNGQVQEYDISTASMPYLTRPGQVRYKIMMGRPQEWGHHVEGEFFSGAEASWGIANGWSLYGGALGDENYQSAALGVGRDLSTFGAVAFDVTHSHTKLDKDTAYGKGSLDGNSFRVSYSKDFDQLNSRVTFAGYRFSEENFMTMSEYLDASDSGMVRTGNDKEMYTATYNQNFRDAGVSVYLNYTRHTYWDREEQTNYNIMLSHYFNMGSIRNMSVSLTGYRYEYDNRADKGMYISLSMPWGDNSTVSYNGNYGSGTDSSQVGYFSRVDDATHYQLNVGTSDKHTSVDGYYSHDGSLAQVDLSANYHEGQYTSAGLSLQGGATLTAHGGALHRTQNMGGTRLLIDADGVADVPVEGNGAAVYTNMFGKAVVSDVNNYYRNQAYIDLNKLPENAEATQSVVQATLTEGAIGYRKFAVISGQKAMAVLRLQDGSHPPFGAEVKNDNEQTVGLVDDDGNVYLAGVKPGEHMSVFWSGVAHCDINLPDPLPADLFNGLLLPCQHKGNVAPVVPDDIKPVIQEQTQQVTPTNPPVSVSANQ

SEQ ID NO: 20033 - protein, 812 aa, Escherichia coli
MKKYVTTKSVQPVAFRLTTLSLVMSAVLGSASVIAGEKLDMSFIQGGGGVNPEVWAALNGSYAPGRYLVDLSLNGKEAGKQILDVTPQDSNELCLTEAWLTKAGIYVSADYFREGYDATRQCYVLTKAPSVKVDFDVSTQSLALSLPQKGLVKMPENVDWDYGASAFRVNYNANANTGRNNTSAFGLADLKANIGHWVVSSSATASGGDSGDNSTTINMFTATRAIRALSADLAVGKTSTGDSLLGSTGTYGVSLSRNNSMKPGNLGYTPVFSGIANGPSRVTLTQNGRLLHSEMVPAGPFSITDVPLYTSGDVTMKITGEDGREQVQNFPLSVMAGQLSPGQHEFSVAAGLPDDDSDLKGGVFAASYGYGLDGLTLRAGGVFNQDWQGASAGVVAGLGYLGAVSADGAYATAKYRDGSHSGNKVQLSWSKQLETTNTGLRVSWSRQSEEYEGMSSFDPTELWSQSNHGRRTKDEWNAGISQPVGGLFSLSVSGWQRSYYPASMTGSYRYSDDNGKETGITGSLSTQIKGVSLNLGWSGSRNSRGENNWSASASVSVPFTLFDRRYSSSASVSTSKGGGTGFSTGVSGSLNDRFSYGLGGGRDGDGGTSSYLNASYSGDRAYLNGVLNHSQSGGTSGSVSVSGSVLAVPAAKDIMFSRTTGDTVAVVNVKDTPGVKVTSGDGQTDSDGNLVVPLNSYGWNTVTIDAGTLPLSTELTNTSQKVVPTDKAVVWMPFDALKVKRYLLQVKQRDGEFVPGGTWARDSKNTPLGFVANNGVLMINTVDAPGDITLGQCRIPAARLQDTEKLQEITCE

SEQ ID NO: 20034 - protein, 838 aa, Escherichia coli; identical to SEQ ID NO: 3764

SEQ ID NO: 20035 - protein, 266 aa, Escherichia coli; identical to SEQ ID NO: 1894

SEQ ID NO: 20036 - protein, 161 aa, Escherichia coli; identical to SEQ ID NO: 2582

SEQ ID NO: 20037 - protein, 878 aa, Escherichia coli
MSYLNLRLYQRNTQCLHIRKHRLAGFFVRLVVACAFAAQAPLSSAELYFNPRFLADDPQAVADLSRFENGQELPPGTYRVDIYLNNGYMATRDVTFNTGDSEQGIVPCLTRAQLASMGLNTASVSGMNLLADDACVPLTSMIHDATAHLDVGQQRLNLTIPQAFMSNRARGYIPPELWDPGINAGLLNYNFSGNSVQNRIGGNSHYAYLNLQSGLNIGAWRLRDNTTWSYNSSDRSSGSKNKWQHINTWLERDIIPLRSRLTLGDGYTQGDIFDGINFRGAQLASDDNMLPDSQRGFAPVIHGIARGTAQVTIKQNGYDIYNSTVPPGPFTINDIYAAGNSGDLQVTIKEADGSTQIFTVPYSSVPLLQREGHTRYSITAGEYRSGNAQQEKPRFFQSTLLHGLPAGWTIYGGTQLADRYRAFNFGIGKNMGALGALSVDMTQANSTLPDDSQHDGQSVRFLYNKSLNESGTNIQLVGHRYSTSGYFNFADTTYSRMNGYNIETQDGVIQVKPKFTDYYNLAYNKRGKLQLTVTQQLGRTSTLYLSGSHQTYWGTSNVDEQFQAGLNTAFEDINWTLSYSLTKNAWQKGRDQMLALNVNIPFSHWLRSDSKSQWRHASASYSMSHDLNGRMTNLAGVYGTLLEDNNLSYSVQTGYAGGGDGNSGSTGYATLNYRGGYGNANIGYSHSDDIKQLYYGVSGGVLAHANGVTLGQPLNETVVLVKAPGAKDAKVENQTGVRTDWRGYAVLPYATEYRENRVALDTNTLADNVDLDNAVANVVPTRGAIVRAEFKARVGIKLLMTLTHNNKPLPFGAMVTSESSQSSGIVADNGQVYLSGMPLAGKVQVKWGEEENAHCVANYQLPPESQQQLLTQLSAECR

SEQ ID NO: 20038 - protein, 819 aa, Escherichia coli; identical to SEQ ID NO: 4271

SEQ ID NO: 20039 - protein, 822 aa, Escherichia coli; identical to SEQ ID NO: 11208

SEQ ID NO: 20040 - protein, 869 aa, Escherichia coli
MKIPTTTDIPQRYTWCLAGICYSSLAILPSFLSYAESYFNPAFLLENGTSVADLSRFERGNHQPAGVYRVDLWRNDEFIGSQDIVFESTTENTGDKSGGLMSCFNQVLLERIGLNSSAFPELAQQQNNKCINLLKAVPDATINFDFAAMRLNITIPQIALLSSAHGYIPPEEWDEGIPALLLNYNFTGNRGNGNDSYFFSELSGINIGPWRLRNNGSWNYFRVNGYHSEQWNNIGTWVQRAIIPLKSELVMGDGNTGSDIFDGVGFRGVRLYSSDNMYPDSQQGFAPTVRGIARTAAQLTIRQNGFIIYQSYVSPGAFEITDLHPTSSNGDLDVTIDERDGNQQNYTIPYSTVPILQREGRFKFDLTAGDFRSGNSQQSSPFFFQGTALGGLPQEFTAYGGTQLSANYTAFLLGLGRNLGNWGAVSLDVTHARSQLADDSRHEGDSIRFLYAKSMNTFGTNFQLMGYRYSTQGFYTLDDVAYRRMEGYEYDYDYDGEHRDEPIIVNYHNLRFSRKDRLQLNISQSLNDFGSLYISGTHQKYWNTSDSDTWYQVGYTSSWVGISYSLSFSWNESVGIPDNERIVGLNVSVPFNVLTKRRYTRENALDRAYASFNANRNSNGQNSWLAGVGGTLLEGHNLSYHVSQGDTSNNGYTGSATANWQATYGTLGVGYNYDRDQHDVNWQLSGGVVGHENGITLSQPLGDTNVLIKAPGAGGVRIENQTGILTDWRGYAVMPYATVYRYNRIALDTNTMGNSIDVEKNISSVVPTQGALVRANFDTRIGVRALITVTQGGKPVPFGSLVRENSTGITSMVGDDGQVYLSGAPLSGELLVQWGDGANSRCIAHYVLPKQSLQQAVTVISAVCTHPGS

SEQ ID NO: 20041 - protein, 231 aa, Escherichia coli; identical to SEQ ID NO: 3055

SEQ ID NO: 20042 - protein, 258 aa, Escherichia coli
MSKRNAVTTFFTNRVTKALGMTLALMMTCQSAMASLAADQTRYIFRGDKDALTITVTNNDKERTFGGQAWVDNIVEKDTRPTFVVTPSFFKVKPNGQQTLRIIMASDHLPKDKESVYWLNLQDIPPALEGSGIAVALRSKLKLFYRPKALLEGRKGAEEGISLQSRPDGRTMLVNTTPYIFAIGSLLDGNGKKIATDNGTTQKLLMFMPGDEVQVKGNVVKVDSLNDYGELQTWTINKKKPAAPEAAKAEKADTAEQK

SEQ ID NO: 20043 - protein, 870 aa, Escherichia coli
MKIKSTFKLHNLSVAIIACLSSAAYAEDYFDPDLLSLGNRDMSLTDLSAFSEQGYSAPGVYIVDIYVNGNYLKTDSIRFEHDKTNTLKPLFSLNDLNEIGVNLHSLKGTEHLPHDRASIDNLSLIPFSSFVFDNSKQRLNINVAQVHMQKETDNRLARKFWDQGIPALFVNYSYSGSQGQTRGNKNKSSTTSDFLSLNAGANLGAWRLRSNMNWTQSGFESEQYDTFEDAYRKQKSSQSKWDTGDTYLQRDVQFLNSELTIGDYRTTSITEQLIDGFQFRGVSLSSSEYMIPAALRGFAPVITGYARTNAEVIVTQNGYSIYQTHVAPGPFRIDDLPGGSSAGDIYVSVKESDGTVHGFRQAYSTLPEMQRQGDFKFEYSVGRYKQSGYSTYENTPLFSNTSFLYGLPHNVTAMGNLLYSGDYQSVSLGAAFSLGMLGTLSTSVTSSVTEGRDNDKLRGYSVNARYSKSLTETGTLFQLASYRYSTPDFRTFSEANVEEYRGSSYINYMLSGRRKDTWSLILNQSITSGLSVGVSGRRDNYWDRHSTTSLSAGLNGTFRQTSWSLNYNIDRVRGNGSWPENRELSLSVSVPFSAFMSSGSMSSANFNYRTAHNNQGRTTNMVSLNGSALEENRLSWNISENWSNSSRNYQRDENFSAGVSYDSQYARLYGGYGRTSQSNTYNYGASGSLLAHPGGVIVSRQNIGNAAALVHVPDVPGARVMNGRDIHTDNKGFALVPYVAIYEKNNITIDPVSLSDGIELSETSKATYPTKGAIVSVEYKVHSGQQALINLTHDGKPVPLGAFVTIGDQVFIVGHSGQVYVSGVPESGRLKVKWGDKESYVANYKLNAKSPRHSESDEKWRPLQEINVVL

SEQ ID NO: 20044 - protein, 241 aa, Escherichia coli
MRLLSVGVCLLFSATTLAAEFPRNTFGFTSTRIIFNEKGNKGSSVSFVNNTNKTYLVAPAVYEADKNGNKSDVRSPAFVVSPFLKKSQPFSEDVLKIVRTGGRLPDDTESLFYLSSVLIPSRTSSVPERIAVDVGYRWNMKILYRPLSLKDENISKSLEKLKVLKEGNRIKLINNSPLWMTVVNVKVNDSTVNEGAAIMISPHSSALLNETAVSATSVSLQLVDESGHRIPRYGKRFTFDA

SEQ ID NO: 20045 - protein, 254 aa, Escherichia coli
MKYRKLQILNCVALGLIAFTVNAAPSDVTVSGKQYGVILGGSRVIYPLDSNGAVVSVDNPQDYPVLIQTRVFDENKSEAAPFVVTPPLFRLDAKQRSSLRLTQTGGSFSRDKESLQWLCVKGIPPKEDDLWVGDKGKEKSPGSGVGISLQIAIDNCIKIMVRPNELKGNPSQFAGDLVWKIDGQKLVAENLTPFYMNLGKVTFSGKEVLPHFVPPKSKWMFDLPKGTSGQGHVSWQIINDQGGLSQTYSKNVIF

SEQ ID NO: 20046 - protein, 123 aa, Escherichia coli
MAEMAVLNNVMTTSAKKRKPGLLSRCLAVVNKSTAKALVKYVAAPLALWLAAQGMAQATDLASAGKADVEATFGEDSTMMYYFMIAEVFLVFMIYLRNHNPATFVLIPVFIVVTKVIFSMIAP

SEQ ID NO: 20047 - protein, 746 aa, Escherichia coli; identical to SEQ ID NO: 4389

SEQ ID NO: 20048 - protein, 368 aa, Escherichia coli
MNKTITALAIMMASFAANASVLPETPVPFKSGTGAIDNNTVYIGLGSAGTAWYKLDTQAKDKKWTALAAFPGGPRDQATSAFIDGNLYVFGGIGKNSEGLTQVFNDVHKYNPKTNSWVKLMSHAPMGMAGHVTFVHNGKAYVTGGVNQNIFNGYFEDLNEAGKDSATIDKINAHYFDKKAEDYFFNKFLLSFDPSTQQWSYAGESPWYGTAGAALVNKGDKTWLINGEAKPGLRTDAVFELDFTGNNLKWNKLAPVSSPDGVAGGFAGISNDSLIFAGGAGFKGSRENYQNGKNYAHEGLKKSYSTDIHLWHNGKWDKSGELSQGRAYGVSLPWNNSLLIIGGETAGGKAVTDSVLISVRDNKVTVQN

SEQ ID NO: 20049 - protein, 204 aa, Escherichia coli; identical to SEQ ID NO: 2957

SEQ ID NO: 20050 - protein, 866 aa, Escherichia coli; identical to SEQ ID NO: 4866

SEQ ID NO: 20051 - protein, 246 aa, Escherichia coli; identical to SEQ ID NO: 3021

SEQ ID NO: 20052 - protein, 747 aa, Escherichia coli; identical to SEQ ID NO: 4394

SEQ ID NO: 20053 - protein, 729 aa, Escherichia coli; identical to SEQ ID NO: 4316

SEQ ID NO: 20054 - protein, 663 aa, Escherichia coli; identical to SEQ ID NO: 1910

SEQ ID NO: 20055 - protein, 250 aa, Escherichia coli; identical to SEQ ID NO: 3048

SEQ ID NO: 20056 - protein, 233 aa, Escherichia coli
MVFRNFIIIILCFLVMSCAHAGIRLNKTRVIFNEKNPSTSITFSNTGKDNYLVEAAVIDPGLNKVSDSFMVIPPIFRSEGGQSSVLKIIRKGGELASDKESDYRLVLNAIPASERNTKERAARVSFSLGFSVKLFYRPESLKHTPDDAYKRLTFHRKDSTTVIARNDSEYNLSLSQLFLGKQQINLNKQPSMIRPFASVVFKTPEAVSEARWRLINDFGGETEEHLSRIQQGD

SEQ ID NO: 20057 - protein, 208 aa, Escherichia coli; identical to SEQ ID NO: 1949

SEQ ID NO: 20058 - protein, 883 aa, Escherichia coli; identical to SEQ ID NO: 4305

SEQ ID NO: 20059 - protein, 412 aa, Escherichia coli; identical to SEQ ID NO: 3323

SEQ ID NO: 20060 - protein, 760 aa, Escherichia coli; identical to SEQ ID NO: 3923

SEQ ID NO: 20061 - protein, 236 aa, Escherichia coli; identical to SEQ ID NO: 3286

SEQ ID NO: 20062 - protein, 233 aa, Escherichia coli; identical to SEQ ID NO: 3649

SEQ ID NO: 20063 - protein, 252 aa, Escherichia coli; identical to SEQ ID NO: 3400

SEQ ID NO: 20064 - protein, 472 aa, Escherichia coli; identical to SEQ ID NO: 3900

SEQ ID NO: 20065 - protein, 351 aa, Escherichia coli; identical to SEQ ID NO: 4165

SEQ ID NO: 20066 - protein, 245 aa, Escherichia coli
MPARHLYFIMTNTWNRLALLIFAVLSLLVAGELRAGVVVGGTRFIFPADRESISILLTNTSQESWLINSKINRPTRWAGGEASTVPAPLLAAPPLILLKPGTTGTLRLLRTESDILPVDRETLFELSIASVPSGKVENQSVKVAMRSVFKLFWRPEGLPGDPLEAYQQLRWTRNSQGVQLTNPTPYYINLIQLSVNGKALSNAGVVPPKSQRQTSWCQAIAPCHVAWRAINDYGGLSAKKEQNLP

SEQ ID NO: 20067 - protein, 362 aa, Escherichia coli; identical to SEQ ID NO: 2434

SEQ ID NO: 20068 - protein, 236 aa, Escherichia coli
MNIIFSLFLFILTTTLSCAYAGVGLDATRIIYNEGEKAVNVGVRNTDSKLNYLIQPSVSTDLDKLNNAAPFVFSPSLFKLESGSESIVKIMVLNHAKLPEKQESLFWFSVTAIPSSEKRVGISDFDVLRGGVKIAVGNTIKLIYRPKNLPVSPKEGAENLKFGKTKEGMLKAENGSPYYINLSSLILGGRPVKSDNMMMIPPYGELVFKGIAPPKNLKEIQWNVINDNGGVENYRF

SEQ ID NO: 20069 - protein, 700 aa, Escherichia coli; identical to SEQ ID NO: 4321

SEQ ID NO: 20070 - protein, 360 aa, Escherichia coli
MKKLTVAISAVAASVLIAMSAQAAEIYNKDSNKLDLYGKVNAGHYFSSNDKHDGDKTYARLGFKGETQINDKLTGFGQWEYEFKGNHAESQGSSADKTRLAFAGLKFGDYGSIDYGRNYGVAYDIGAWTNVLPEFGGDTWTQTDVFMTDRTTGVATYRNNDLFGLVDGLNFAAQYQGKNDRTDVTQANGDGFGFSTTYEYEGFGVGATYAKSDRTNNQVIYGNNSLNASGQNAEVWAAGLKYDASNIYLATTYSETQNMTVFGKNHIANKAQNFEVVAQYQFDFGLRPSVAYLQSKGKDLGVFGDQDLVKYVDVGATYYFNKNMSTFVDYKINLLDKNDFTRNLDINADDIVAVGMVYQF

SEQ ID NO: 20071 - protein, 431 aa, Escherichia coli; identical to SEQ ID NO: 3408

SEQ ID NO: 20072 - protein, 784 aa, Escherichia coli; identical to SEQ ID NO: 2244

SEQ ID NO: 20073 - protein, 614 aa, Escherichia coli; identical to SEQ ID NO: 1888

SEQ ID NO: 20074 - protein, 365 aa, Escherichia coli; identical to SEQ ID NO: 3084

SEQ ID NO: 20075 - protein, 686 aa, Escherichia coli; identical to SEQ ID NO: 4194

SEQ ID NO: 20076 - protein, 387 aa, Escherichia coli; identical to SEQ ID NO: 3908

SEQ ID NO: 20077 - protein, 678 aa, Escherichia coli; identical to SEQ ID NO: 3511

SEQ ID NO: 20078 - protein, 118 aa, Escherichia coli [sequence omitted]

SEQ ID NO: 20079 - protein, 243 aa, Escherichia coli; identical to SEQ ID NO: 2910

SEQ ID NO: 20080 - protein, 191 aa, Escherichia coli; identical to SEQ ID NO: 2727

SEQ ID NO: 20081 - protein, 224 aa, Escherichia coli; identical to SEQ ID NO: 3035

SEQ ID NO: 20082 - protein, 243 aa, Escherichia coli; identical to SEQ ID NO: 3483

SEQ ID NO: 20083 - protein, 241 aa, Escherichia coli
MSNKNVNVRKSQEITFCLLAGILMFMAMMVAGRAEAGVALGATRVIYPAGQKQVQLAVTNNDENSTYLIQSWVENADGVKDGRFIVTPPLFAMKGKRENTLRILDATNNQLPQDRESLFWMNVKAIPSMDKSKLTENTLQLAIISRIKLYYRPAKLALPPDQAAEKLRFRRSANSLTLINPTPYYLTVTELNAGTRILENALVPPMGESTVKLPSDAGSNITYRTINDYGALTPKMTGVME

SEQ ID NO: 20084 - protein, 367 aa, Escherichia coli; identical to SEQ ID NO: 4369

SEQ ID NO: 20085 - protein, 213 aa, Escherichia coli; identical to SEQ ID NO: 2232

SEQ ID NO: 20086 - protein, 230 aa, Escherichia coli; identical to SEQ ID NO: 4274

SEQ ID NO: 20087 - protein, 161 aa, Escherichia coli; identical to SEQ ID NO: 2582

SEQ ID NO: 20088 - protein, 826 aa, Escherichia coli; identical to SEQ ID NO: 3563

SEQ ID NO: 20089 - protein, 878 aa, Escherichia coli; identical to SEQ ID NO: 2855

SEQ ID NO: 20090 - protein, 863 aa, Escherichia coli; identical to SEQ ID NO: 3959

SEQ ID NO: 20091 - protein, 860 aa, Escherichia coli; identical to SEQ ID NO: 3544

SEQ ID NO: 20092 - protein, 816 aa, Escherichia coli; identical to SEQ ID NO: 3562

SEQ ID NO: 20093 - protein, 368 aa, Escherichia coli; identical to SEQ ID NO: 2370

SEQ ID NO: 20094 - protein, 266 aa, Escherichia coli; identical to SEQ ID NO: 1892

SEQ ID NO: 20095 - protein, 869 aa, Escherichia coli; identical to SEQ ID NO: 2903

SEQ ID NO: 20096 - protein, 740 aa, Escherichia coli
MVDASTEFDVGQQHLSLSVPQIYVGRMARGYVSPDLWEEGINAGLLNYSFNGNSINNRSNHNAGKSNYAYLNLQSGINIGSWRLRDNSTWSYNSGSSNSSDSNKWQHINTSAERDIIPLRSRLTVGDSYTDGDIFDSVNFRGLKINSTEAMLPDSQHGFAPVIHGIARGTAQVSVKQNGYDVYQTTVPPGPFTIDDINSAANGGDLQVTIKEADGSIQTLYVPYSSVPVLQRAGYTRYALAMGEYRSGNNLQSSPRFIQGSLMHGLEGNWTPYGGMQIAEDYQAFNLGIGKDLGLFGAFSFDITQANTTLADGTRHSGQSVKSVYSKSFYQTGTNIQVAGYRYSTQGFYNLSDSAYSRMSGYTVKPPTGDSNEQTQFIDYFNLFYSKRGQEQISISQQLGNYGATFFSASRQSYWNTSRSDQQISFGLNVPFGDITTSLNYSYSNNIWQNDRDHLLAFTLNVPFSHWMRTDSQSAFRNSNASYSMSNDLKGGMTNLSGVYGTLLPDNNLNYSVQVGNTHGGNTSSGTSGYSTLNYRGAYGNTNVGYSRSGDSSQIYYGMSGGIIAHADGITFGQPLGDTMVLVKAPGADNVKIENQTGIHTDWRGYAILPFATEYRENRVALNANSLADNVELDETVVTVIPTHGAIARATFNAQIGGKVLMTLKYGNKSVPFGAIVTHGENKNGSIVAENGQVYLTGLPQSGKLQVSWGNDKNSNCIVDYKLPEVSPGTLLNQQTAICR

SEQ ID NO: 20097 - protein, 237 aa, Escherichia coli; identical to SEQ ID NO: 2816

SEQ ID NO: 20098 - protein, 747 aa, Escherichia coli; identical to SEQ ID NO: 2954

SEQ ID NO: 20099 - protein, 224 aa, Escherichia coli; identical to SEQ ID NO: 3578

SEQ ID NO: 20100 - protein, 367 aa, Escherichia coli; identical to SEQ ID NO: 2431

SEQ ID NO: 20101 - protein, 512 aa, Escherichia coli; identical to SEQ ID NO: 2813

SEQ ID NO: 20102 - protein, 518 aa, Escherichia coli; identical to SEQ ID NO: 2351

SEQ ID NO: 20103 - protein, 230 aa, Escherichia coli; identical to SEQ ID NO: 2995

SEQ ID NO: 20104 - protein, 122 aa, Escherichia coli; identical to SEQ ID NO: 2915

SEQ ID NO: 20105 - protein, 241 aa, Escherichia coli; identical to SEQ ID NO: 2887

SEQ ID NO: 20106 - protein, 224 aa, Escherichia coli; identical to SEQ ID NO: 6030

SEQ ID NO: 20107 - protein, 760 aa, Escherichia coli; identical to SEQ ID NO: 2078

SEQ ID NO: 20108 - protein, 229 aa, Escherichia coli; identical to SEQ ID NO: 4047

SEQ ID NO: 20109 - protein, 229 aa, Escherichia coli; identical to SEQ ID NO: 3589

SEQ ID NO: 20110 - protein, 659 aa, Escherichia coli; identical to SEQ ID NO: 2942

SEQ ID NO: 20111 - protein, 567 aa, Escherichia coli; identical to SEQ ID NO: 3518

SEQ ID NO: 20112 - protein, 191 aa, Escherichia coli; identical to SEQ ID NO: 2727

SEQ ID NO: 20113 - protein, 236 aa, Escherichia coli; identical to SEQ ID NO: 3970

SEQ ID NO: 20114 - protein, 89 aa, Escherichia coli; identical to SEQ ID NO: 2812

SEQ ID NO: 20115 - protein, 700 aa, Escherichia coli; identical to SEQ ID NO: 2926

SEQ ID NO: 20116 - protein, 89 aa, Escherichia coli; identical to SEQ ID NO: 2810

SEQ ID NO: 20117 - protein, 111 aa, Escherichia coli; identical to SEQ ID NO: 2911

SEQ ID NO: 20118 - protein, 208 aa, Escherichia coli; identical to SEQ ID NO: 1949

SEQ ID NO: 20119 - protein, 412 aa, Escherichia coli; identical to SEQ ID NO: 2908

SEQ ID NO: 20120 - protein, 859 aa, Escherichia coli; identical to SEQ ID NO: 4088

SEQ ID NO: 20121 - protein, 678 aa, Escherichia coli; identical to SEQ ID NO: 2902

SEQ ID NO: 20122 - protein, 729 aa, Escherichia coli; identical to SEQ ID NO: 2948

SEQ ID NO: 20123 - protein, 660 aa, Escherichia coli; identical to SEQ ID NO: 4092

SEQ ID NO: 20124 - protein, 746 aa, Escherichia coli; identical to SEQ ID NO: 2949

SEQ ID NO: 20125 - protein, 713 aa, Escherichia coli; identical to SEQ ID NO: 3523

SEQ ID NO: 20126 - protein, 233 aa, Escherichia coli; identical to SEQ ID NO: 3548

SEQ ID NO: 20127 - protein, 351 aa, Escherichia coli; identical to SEQ ID NO: 2872

SEQ ID NO: 20128 - protein, 252 aa, Escherichia coli; identical to SEQ ID NO: 3543

SEQ ID NO: 20129 - protein, 227 aa, Escherichia coli; identical to SEQ ID NO: 3570

SEQ ID NO: 20130 - protein, 998 aa, Escherichia coli; identical to SEQ ID NO: 3056

SEQ ID NO: 20131 - protein, 696 aa, Escherichia coli; identical to SEQ ID NO: 4038

SEQ ID NO: 20132 - protein, 224 aa, Escherichia coli; identical to SEQ ID NO: 3604

SEQ ID NO: 20133 - protein, 539 aa, Escherichia coli; identical to SEQ ID NO: 3050

SEQ ID NO: 20134 - protein, 655 aa, Escherichia coli; identical to SEQ ID NO: 7517

SEQ ID NO: 20135 - protein, 241 aa, Escherichia coli; identical to SEQ ID NO: 3582

SEQ ID NO: 20136 - protein, 614 aa, Escherichia coli; identical to SEQ ID NO: 1883

SEQ ID NO: 20137 - protein, 362 aa, Escherichia coli; identical to SEQ ID NO: 2998

SEQ ID NO: 20138 - protein, 243 aa, Escherichia coli; identical to SEQ ID NO: 3561

SEQ ID NO: 20139 - protein, 715 aa, Escherichia coli; identical to SEQ ID NO: 3971

SEQ ID NO: 20140 - protein, 366 aa, Escherichia coli; identical to SEQ ID NO: 3520

SEQ ID NO: 20141 - protein, 213 aa, Escherichia coli; identical to SEQ ID NO: 2232

SEQ ID NO: 20142 - protein, 866 aa, Escherichia coli
MYRTHRQHSLLSSGGVPSFIGGLVVFVSAAFNAQAETWFDPAFFKDDPSMVADLSRFEKGQKITPGVYRVDIVLNQTIVNTRNVNFVEITPEKGIAACLTTESLDAMGVNTDAFPAFKQLDKQACVPLAEIIPDASVTFNVNKLRLEISVPQIAIKSNARGYVPPERWDEGINALLLGYSFSGANSIHSSADSDSGDSYFLNLNSGVNLGPWRLRNNSTWSRSSGQTAEWKNLSSYLQRAVIPLKGELTVGDDYTAGDFFDSVSFRGVQLASDDNMLPDSLKGFAPVVRGIAKSNAQITIKQNGYTIYQTYVSPGAFEISDLYSTSSSGDLLVEIKEADGSVNSYSVPFSSVPLLQRQGRIKYAVTLAKYRTNSNEQQESKFAQATLQWGGPWGTTWYGGGQYAEYYRAAMFGLGFNLGDFGAISFDATQAKSTLADQSEHKGQSYRFLYAKTLNQLGTNFQLMGYRYSTSGFYTLSDTMYKHMDGYEFNDGDDEDTPMWSRYYNLFYTKRGKLQVNISQQLGEYGSFYLSGSQQTYWHTDQQDRLLQFGYNTQIKDLSLGVSWNYSKSRGQPDADQVFALNFSLPLNLLLPRSNDSYTRKKNYAWMTSNTSIDNEGHITQNLGLTETLLDDGNLSYSVQQGYNSEGKTANGSASMDYKGAFADARVGYNYSDNGSQQQLNYALSGSLVAHSQGITLGQSLGETNVLIAAPGAENTRVANSTGLKTDWRGYTVVPYATSYRENRIALDAASLKRNVDLENAVVNVVPTKGALVLAEFNAHAGARVLMKTSKQGIPLRFGAIATLDGIQTNSGIIDDDGSLYMSGLPAQGAITVRWGEAPDQICHISYQLTEQQINSAITRMDAICR

SEQ ID NO: 20143 - protein, 834 aa, Escherichia coli
MYKKLKLTTISELIKNIYCSLSVLIIGCASAYAVEFNKDLIEAEDRENVNLSQFETDGQLPVGKYSLNALINNKRTPIHLDLQWVLIDNQTAVCLTPEQLTLLGFTDEIIEVAQQNLIDGCYPIEKEKQITTYLDKGKMQLSISAPQAWLKYKDANWTPPELWDHGIAGAFLDYNLYASHYAPHQGDNSQNISSYGQAGVNLGAWRLRTDYQYDQSFNNGKSQANNLDFPRIYLFRPIPAINAKLTIGQYDTESSIFDSFHFSGVSLKSDENMLPPDLRGYAPQITGVAQTNAKVTVSQNNRIIYQENVPPGPFAITNLFNTLQGQLDVKVEEEDGQVTQWQVASNSIPYLTRKGQIRYTTAMGKPTSVGGDSLQQPFFWTGEFSWGWLNNVSLYGGSVLTNRDYQSLAAGVGFNLNSLVSLSFDVTRSDAQLHNQDKETGYSYRANYSKRFESTGSQLTFAGYRFSDKNFVTMNEYINDTNHYTNYQNEKESYIVTFNQYLESLRLNTYVSLARNTYWDASSNVNYSLSLSRDFDIGPLKNVSTSLTFSRINWEEDNQDQLYLNISIPWGTSRTLSYGMQRNQDNKISHTASWYDSSDRNNSWSVSASGDNDEFKDMKASLRASYQHNTENGRLYLSGTSQRDSYYSLNASWNGSFTATRHGAAFHDYSGSADSRFMIDADGAEDIPLNNKRAVTNRYGIGVIPSVSSYITTSLSVDTRNLPENVDIENSVITTTLTEGAIGYAKLDTRKGYQIMGVIRLADGSHPPLGISVKDKTSHKELGLVADGGFVYLNGIQDDSKLTLRWGDKSCFIQPPNSSNLTTGTVILPCISQN

SEQ ID NO: 20144 - protein, 266 aa, Escherichia coli; identical to SEQ ID NO: 1894

SEQ ID NO: 20145 - protein, 700 aa, Escherichia coli; identical to SEQ ID NO: 3128

SEQ ID NO: 20146 - protein, 111 aa, Escherichia coli; identical to SEQ ID NO: 3096

SEQ ID NO: 20147 - protein, 249 aa, Escherichia coli
MRYLNTKNLIAAGVLLACMSSIAWGAIIPDRTRIIMNESDKGEALKLTNQSKNLPYLAQTWIEDTKGNKSRDFIVTVPPMVRLNPSEQIQIRMISHEKIAQLPNDRETLFYFNVREIPPKTDKKNVMQVTMQHALKLFWRPKAIELEDDGVMSYEKVEIIRRNDGSIRFNNKMPYHVTLGYIGTNGITMLPQTQSLMVTPYSHADTQFKNVPSAFQVGYINDFGGLSFYEINCPTVNNSCNVSVAKRDK

SEQ ID NO: 20148 - protein, 119 aa, Escherichia coli; identical to SEQ ID NO: 11978

SEQ ID NO: 20149 - protein, 866 aa, Escherichia coli
MTIKPTKNYHNHLTRIATFCALLYCNSAFCAELVEYDHTFLMGQNASNIDLSRYSEGNPAIPGMYDVSVYVNDQPIINQSITFIEIEGKKNAQACITLKNLLQFHINSPDINNEKAVLLARDETLGNCLNLTEIIPQASVRYDVNEQRLDIDVPQAWVMKNYQNYVDPSLWENGINAAMLSYNLNGYHSETPGRRNDSIYAAFNGGMNLGAWRLRASGNYNWMTDSGSNYDFKNRYIQRDIASLRSQLILGESYTTGETFDSVSIRGIRLYSDSRMLPPTLASFAPIIHGVANTNAKVTITQGGYKIYETTVPPGAFVIDDLSPSGYGSDLIVTVEESDGSKRTFSQPFSSVVQMLRPGVGRWDISGGQVLKDDIQDEPNLFQASYYYGLNNYLTGYTGIQITDNNYTAGLLGLGLNTSVGAFSFDVTHSNVRIPDDKTYQGQSYRVSWNKLFEETSTSLNIAAYRYSTQNYLGLNDALTLIDEVKHPEQDLEPKSMRNYSRMKNQVTVSINQPLKFEKKDYGSFYLSGSWSDYWASGQNRSNYSIGYSNSASWGSYSVSAQRSWNEDGDTDDSVYLSFTIPIEKLLGTEQRTSGFQSIDTQMSSDFKGNNQLNVSSSGYSDNARVSYSVNTGYTMNKASKDLSYVGGYASYESPWGTLAGSVSANSDNSRQVSLSTDGGFVLHSGGLTFSNDSFSDSDTLAVVQAPGAQGARINYGNSTIDRWGYGVTSALSPYHENRIALDINDLENDVELKSTSAVAVPRQGSVVFADFETVQGQSAIMNITRSDGKNIPFAADIYDEQGNVIGNVGQGGQAFVRGIEQQGNISIKCLEESKPVSCLAHYQQSSEAEKIAQSIILNGIRCQIQ

SEQ ID NO: 20150 - protein, 246 aa, Escherichia coli; identical to SEQ ID NO: 9522

SEQ ID NO: 20151 - protein, 663 aa, Escherichia coli; identical to SEQ ID NO: 3453

SEQ ID NO: 20152 - protein, 224 aa, Escherichia coli; identical to SEQ ID NO: 3115

SEQ ID NO: 20153 - protein, 774 aa, Escherichia coli
MTPLRVFRKTTPLVNAIRLSLLPLAGLSFSAFAAQVNIAPGSLDKALNQYAAHSGFTLSVDASLTRGKQSNGLHGDYDVESGLQQLLDGSGLQVKPLGNNSWTLEPAPAPKEDALTVVGDWLGDARENDVFEHAGARDVIRREDFAKTGATTMREVLNRIPGVSAPENNGTGSHDLAMNFGIRGLNPRLASRSTVLMDGIPVPFAPYGQPQLSLAPVSLGNMDAIDVVRGGGAVRYGPQSVGGVVNFVTRAIPQDFGIEAGVEGQLSPTSSQNNPKETHNLMVGGTADNGFGTALLYSGTRGSDWREHSATRIDDLMLKSKYAPDEGHTFNSLLQYYDGEADMPGGLSRADYDADRWQSTRPYDRFWGRRKLASLGYQFQPDSQHKFNIQGFYTQTLRSGYLEQGKRITLSPRNYWVRGIEPRYSQIFMIGPSAHEVGVGYRYVNESTHEMRYYTATSSGQLPSGSSPYDRDTRSGTEAHAWYLDDKIDIGNWTITPGMRFEHIESYQNNAITGTHEEVSYNAPLPALNVLYHLTDSWNLYANTEGSFGTVQYSQIGKAVQSGNVEPEKARTWELGTRYDDGALTAEMGLFLINFNNQYDSNQTNDTVTARGKTRHTGLETQARYDLGTLTPTLDNVSIYASYAYVNAEIREKGDTYGNLVPFSPKHKGTLGVDYKPGNWTFNLNSDFQSSQFADNANTVKESADGSTGRIPGFMLWGARVAYDFGPQMADLNLAFGVKNIFDQDYFIRSYDDNNKGIYAGQPRTLYMQGSLKF

SEQ ID NO: 20154 - protein, 838 aa, Escherichia coli; identical to SEQ ID NO: 3764

SEQ ID NO: 20155 - protein, 362 aa, Escherichia coli; identical to SEQ ID NO: 2434

SEQ ID NO: 20156 - protein, 233 aa, Escherichia coli; identical to SEQ ID NO: 3276

SEQ ID NO: 20157 - protein, 729 aa, Escherichia coli; identical to SEQ ID NO: 2948

SEQ ID NO: 20158 - protein, 213 aa, Escherichia coli; identical to SEQ ID NO: 2232

SEQ ID NO: 20159 - protein, 686 aa, Escherichia coli; identical to SEQ ID NO: 3129

SEQ ID NO: 20160 - protein, 161 aa, Escherichia coli; identical to SEQ ID NO: 2582

SEQ ID NO: 20161 - protein, 208 aa, Escherichia coli; identical to SEQ ID NO: 1949

SEQ ID NO: 20162 - protein, 191 aa, Escherichia coli
MKKSLLGLTFASLMFSAGSAVAADYKIDKEGQHAFVNFRIQHLGYSWLYGTFKDFDGTFTFDEKNPAADKVNVTINTTSVDTNHAERDKHLRSADFLNTAKYPQATFTSTSMKKDGDELDITGDLTLNGVTKPVTLEAKLIGQGDDPWGGKRAGFEAEGKIKLKDFNIKTDLGPASQEVDLIISVEGVQQK

SEQ ID NO: 20163 - protein, 231 aa, Escherichia coli; identical to SEQ ID NO: 3055

SEQ ID NO: 20164 - protein, 149 aa, Escherichia coli
MQGKKENTLRIINATNHQLPGDRESLFWVNVKAIPAMEKDQKNENTLQLAIISRIKMFYRPTNLAMAPEEAPAMLRFRRSGSKLTLINPTPYFITVTNMKAGNSNLPNTMVPPKGEVSVDITHAATGDISFQTINDYGALTPRIKATMQ

SEQ ID NO: 20165 - protein, 881 aa, Escherichia coli
MPDHSLFRLRILPWCIALAMSGSYSSVWAEDDIQFDSRFLELKGDTKIDLKRFSSQGYVEPGKYNLQIQLNKQPLAEEYDIYWYAGEDDASKSYACLTPELVAQFGLKEDVAKNLQWSHDAKCLKSGQLEGMEIKADLSQSALVISLPQAYLEYTWPDWDPPSRWDDGISGIVADYSINAQTRHEENGGDDSNEISGNGTVGVNLGPWRMRADWQTNYQHTRSNDDDDEFSGDETQKKWEWSRYYAWRALPSLKAKLALGEDYLRSDIFDGFNYVGGSVSTDDQMLPPNLRGYAPDISGVAHTTAKVTVSQMGRVIYETQVPAGPFRIQDLGDSVSGTLHIRIEEQNGQVQEYDISTASMPYLTRPGQVRYKIMMGRPQEWGHHVEGEFFSGAEASWGIANGWSLYGGALGDENYQSAALGVGRDLSTFGAVAFDVTHSHTKLDKDTAYGKGSLDGNSFRVSYSKDFDQLNSRVTFAGYRFSEENFMTMSEYLDASDSGMVRTGNDKEMYTATYNQNFRDAGVSVYLNYTRHTYWDREEQTNYNIMLSHYFNMGSIRNVSISMTGYRYEYDNREDKGMYISLSMPWGDNSTVSYNGNYGSGTDSSQVGYFSRVDDATHYQLNVGTSDKHTSVDGYYSHDGSLAQVDLSANYHEGQYTSAGLSLQGGATLTAHGGALHRTQNMGGTRLLIDADGVADVPVEGNGAAVYTNMFGKAVVSDVNNYYRNQAYIDLNKLPENAEATQSVVQATLTEGAIGYRKFAVISGQKAMAVLRLSDGSHPPFGAEVKNDNEQTVGLVDDDGNVYLAGVKPGEHMSVFWSGIAHCDINLPAPLPADLFNGLLLPCQHKGNVVPVVPDGIKPVIQEQTQQVTPTNPPVSVSANQ

SEQ ID NO: 20166 - protein, 245 aa, Escherichia coli
MPARHLYFIMTNTWNRLALLIFAVLSLLVAGELQAGVVVGGTRFIFPADRESISILLTNTSQESWLINSKINRPTRWAGGEASTVPAPLLAAPPLILLKPGTTGTLRLLRTESDILPVDRETLFELSIASVPSGKVENQSVKVAIRSVFKLFWRPEGLPGDPLEAYQQLRWTWNSQGVQLTNPTPYYINLIQVSVNGKALSNAGVVPPKSQRQTSWCQAIAPCHVAWRAINDYGGLSAKKEQNLP

SEQ ID NO: 20167 - protein, 241 aa, Escherichia coli
MGATTLALLLSAASLSAQASVTPDRTRLIFNESDKSISVTLRNNDPKLPYLAQSWIEDEKGNKISSPLTVLPPVQRIDSMMNGQVKVQGMPDINKLPADRESLFYFNVREIPPKSNKANTLQIALQTRIKLFWRPKALENVSMKNPWQYKVTLTRNGQEFTVNNPTPYYVIFSNASAEKNGNPAAGFSPLVLLPKTSAPLGVKMDSVPVLTYVNDFDARMPLFFKCTGNTCQVDEEHSRKG

SEQ ID NO: 20168 - protein, 826 aa, Escherichia coli
MLRMTPLASAIVALLLGIEAYAAEETFDTHFMIGGMKDQQVANIRLDDNQPLPGQYDIDIYVNKQWRGKYEIIVKDNPQETCLSIEVIKRLGINSDNFASGKQCLTFEQLVQGGSYTWDIGVFRLDFSVPQAWVEELESGYVPPENWERGINAFYTSYYVSQYYSDYKASGNSKSTYVRFNSGLNLLGWQLHSDASFSKTNNNPGVWKSNTLYLERGFAQLLGTLRVGDMYTSSDIFDSVRFSGVRMFRDMQMLPNSKQNFTPRVQGIAQSNALVTIEQNGFVVYQKEVPPGPFAITDLQLAGGGADLDVSVKEADGSVTTYLVPYAAVPNMLQPGVSKYDFAAGRSHIEGASKQSDFVQAGYQYGFNNLLTLYGGSMVANNYYAFTLGTGWNTRIGAISVDATKSHSKQDNGDVFDGQSYQIAYNKFVSQTSTRFGLAAWRYSSRDYRTFNDHVWANNKDNYRRDENDVYDIADYYQNDFGRKNSFSANMSQSLPEGWGSVSLSTLWRDYWGRSGSSKDYQLSYSNNWRRISYILAASQAYDENHHEEKRFNIFISIPFDWGDDVTTPRRQIYMSNSTTFDDQGFASNNTGLSGTVGSRDQFNYGVNLSYQNQGNETTAGANLTWNAPVATVNGSYSQSSTYRQAGASVSGGIVAWSGGVNLANRLSETFAVMNAPGIKDAYVNGQKYRTTNRNGVVVYDGMTPYRENHLMLDVSQSDSEAELRGNRKIAAPYRGAVVLVNFDTDQRKPWFIKALRADGQPLMFGYEVNDIHGHNIGVVGQGSQLFIRTNEVPPSVNVAIDKQQGLSCTITFGKEIDESRNYICQ

SEQ ID NO: 20169 - protein, 363 aa, Escherichia coli; identical to SEQ ID NO: 3347

SEQ ID NO: 20170 - protein, 243 aa, Escherichia coli; identical to SEQ ID NO: 2910

SEQ ID NO: 20171 - protein, 412 aa, Escherichia coli; identical to SEQ ID NO: 2161

SEQ ID NO: 20172 - protein, 833 aa, Escherichia coli
MAALSPPFIKYLSGMDTVNIYRLSFVSCLVVAMPCALAVEFNLNVLDKSMRDRIDISLLKEKGVIAPGEYFVSVAVNNNQISNGQKINWHKNDDKTIPCINDLLVDKFGLKPEVRQSLPLINQCVDFSSRPEMLFNFDQANQQLNISIPQAWLAWHSENWTPPSTWKEGVAGILMDYNLFASSYRPQDGSSSTNLNAYGTTGINAGAWRLRSDYQLNQTDSDDNHEQSGGISRTYLFRPLPQLGSKLTLGETDFSSNIFDGFSYTGAALASDERMLPWELRGYAPQISGIAQTNATVTISQSGRVIYQKKVPPGPFIIDDLNQSVQGTLDVKVTEEDGRVNNFQVSAASTPFLTRQGQVRYKLAAGQPRPSMSHQTENETFFSNEVSWGMLSNTSLYGGLLLSGDDYHSAAMGIGQNMLWLGALSFDVTWASSHFDTQQDERGLSYRFNYSKQVDATNSTISLAAYRFSDRHFHSYANYLDHKYNDSDAQDEKQTISLSVGQPITPLNLNLYANLLHQTWWNADASTTANITAGFNVDIGDWRDISISTSFNTTHYEDKDRDNQIYLSISLPFGNGGRVGYDMQNSSHSTTHRMSWNDTLDERNSWGMSAGLQSDRPDNGAQVSGNYQHLSSAGEWDISGTYAANDYSSVSSSWSGSFTATQYGAAFHRRSSTNEPRLMVSTDGVADIPVQGNLDYTNHFGIAVVPLISSYQPSTVAVNMNDLPDGVTVAENVIKETWIEGAIGYKSLASRSGKDVNVIIRNASGQFPPLGADIRQDDSGISVGMVGEEGHAWLSGVAENQKFTVVWGDSQHCSLHLPEHMEDTANRLILPCH

SEQ ID NO: 20173 - protein, 678 aa, Escherichia coli; identical to SEQ ID NO: 3014

SEQ ID NO: 20174 - protein, 746 aa, Escherichia coli; identical to SEQ ID NO: 4389

SEQ ID NO: 20175 - protein, 118 aa, Escherichia coli [sequence omitted]

SEQ ID NO: 20176 - protein, 848 aa, Escherichia coli
MRNRMSRFSHDDYTRAMLNLLPSGIAWSRLPDSVQHRLIRGLAQAYRKSDADACALITGAFPETADALTDEWYASLGLNDECGTQASTTDPAQARKFILAKLLSTGGQSVAYFTELAATMGYSISIREYRTPLCGFSWSGHLLSDDNRFNWTVVVAPPGDEVTTSRAYLECLFRRYAPAHTLVTFEWQSSYSAALSIAWDNITHVLSGALTADEGVVVSGVTVNVVIKSASGQRYVATVTTDSEGHWSYEMEDDDFANGWYSSTAYNDLVRLRQLPAGQKSCSYLASNTPSLVSIDSGAFRFCKNATAFDSAFYRCKGLTAIPPGLFAECASATTFYQAFYECTGLTAVGDSAFAGCTGVTTFRQAFYGCTGLRAVGESVFAGCTGATTFEDTFYGCTGLSTVGNSVFAGCASATTFLQAFYGCQALTSLGQGIFADCTGVTTFLQAFYNCRGLTALPEGMFDSCTAVTTFSNAFYGCTALTAIPEGLFDSCTGVTTFNRTFYGCAALTAIPAKLFANCTEVATFEGVFSGCSGLVTIPAGLFEKLTSVTTFDSAFYGCRALTTVGDRVFAGCTGTTTFASVFEGCTGLVTIPADVFAGCSGVRSFYRSFFGCTGLAMVPPELFADCTGATTFYTTFYRCTRLSEVPAELFSGCTGAKSFYKTFGECTGLSEVPARLFADCTGATTFEGVFSGCRGLTTIPAGLFANSASVTTFFQAFYECTGLTAIPSGLFADCVSVTTFRQTFYGCSGLRSMGDGVFAGCASATTFEGTFYGCTGLESDVNDILPAEEYPQITSVYSCFYNCRSLQGSGCALIEKLPGVTSYADAFYNCVSLSDFRTLSERYPVWV

SEQ ID NO: 20177 - protein, 747 aa, Escherichia coli; identical to SEQ ID NO: 2072

SEQ ID NO: 20178 - protein, 241 aa, Escherichia coli; identical to SEQ ID NO: 5807

SEQ ID NO: 20179 - protein, 243 aa, Escherichia coli; identical to SEQ ID NO: 3483

SEQ ID NO: 20180 - protein, 269 aa, Escherichia coli
MSSCMIYKFSSMKNITFIFFILLASPLYANGDKLYRADSRPPDEIKRSGGLMPRGHNEYFDRGTQMNINLYDHARGTQTGFVRYDDGYVSTSLSLRSAHLAGQSILSGYSTYYIYVIATAPNMFNVNDVLGVYSPHPYEQEVSALGGIPYSQIYGWYRVNFGVIDERLHRNREYRDRYYRNLNIAPAEDGYRLAGFPPDHQAWREEPWIHHAPQGCGNSSRTITGDTCNEETQNLSTIYLRKYQSKVKRQIFSDYQSEVDIYNRIRDEL

SEQ ID NO: 20181 - protein, 360 aa, Escherichia coli; identical to SEQ ID NO: 3032

SEQ ID NO: 20182 - protein, 237 aa, Escherichia coli
MRKITQAISAVCLLFALNSSAVALASSPSPINPGTNVARLAEQAPIHWVSVAQIENSLAGRPPMAVGFDIDDTVLFSSPGFWRGKKTFSPESEDYLKNPVFWEKMNNGWDEFSIPKEVARQLIDMHVRRGDAIFFVTGRSPTKTETVSKTLADNFHIPVTNMNPVIFAGDKPGQNTKSQWLQDKNIRIFYGDSDNDITAARDVGARGIRILRASNSTYKPLPQAGAFGEEVIVNSEY

SEQ ID NO: 20183 - protein, 230 aa, Escherichia coli; identical to SEQ ID NO: 3019

SEQ ID NO: 20184 - protein, 760 aa, Escherichia coli; identical to SEQ ID NO: 3923

SEQ ID NO: 20185 - protein, 784 aa, Escherichia coli; identical to SEQ ID NO: 2244

SEQ ID NO: 20186 - protein, 351 aa, Escherichia coli; identical to SEQ ID NO: 2872

SEQ ID NO: 20187 - protein, 840 aa, Escherichia coli; identical to SEQ ID NO: 4545

SEQ ID NO: 20188 - protein, 878 aa, Escherichia coli; identical to SEQ ID NO: 19363

SEQ ID NO: 20189 - protein, 883 aa, Escherichia coli; identical to SEQ ID NO: 9072

SEQ ID NO: 20190 - protein, 885 aa, Escherichia coli
MCSALPALAMEAWNNQQGGNKYQVIFDGKIYENAWWVSSTNCPGKAKANDATNPWRLKRTATAAEISQFGNTLSCEKSGSSSSSTSNTPASNTPANGASATPAQGTVPSNSSVVAWNKQQGGQTWYVVFNGAVYKNAWWVASSNCPGDAKGNDASNPWRYVRAATATEISETSNPQSCTSAPQPAPDVKPAPDVKPAPDVQPAPADKSNDNYAVVAWKGQEGSSTWYVIYNGGIYKNAWWVGAANCPGDAKENDASNPWRYVRAATATEITQYGNPASCSVKPDNNGGAVTPVDPTPETPETPVTPTPDNNEPSTPADSSNDYSLQAWSGQEGSEIYHVIFNGNVYQNAWWVGSEDCPRGTSVENSNNPWRLVRTATAAEMSQYGNPTTCEIDNGGVIIADGFQASKAYSANSIVDYNDAHYKTSVDQDAWGFVPGGDNPWKKYEPAKAWSASTVYVKGDRVVVDGQAYEALFWTQSDNPALIANQNATGSNSRPWKPLGKTQSYSNEELNNAPQFNPETLYASDTLIRFNGENYISQSKVQKVSPSDSNPWRVFVDWTGTKERVGTPKKAWPKHVYAPYVDFTLNTIPDLAALAKSHNVNHFTLAFVVSKDANTCLPTWGTAYGMQNYAQYSKIKALREAGGDVMLSIGGANNAPLAASCKNVDDLMQHYYDIVDNLNLRVLDFDIEGTWVADQASIERRNLAVKKVQDKWKSEGKDIAIWYTLPILPTGLTPEGMNVLSDAKAKGVELAGVNVMTMDYGNAICQSANTEGQNIHGKCATSAIANLHSQLKGLHPNKSDAEIDAMMGTTPMVGVNDVQGEVFYLSDARLVMQDAQKRNLGMVGIWSIARDLPGGTNLSPEFHGLTKEQAPKYAFSEIFAPFTKQ

SEQ ID NO: 20191 - protein, 826 aa, Escherichia coli; identical to SEQ ID NO: 3791

SEQ ID NO: 20192 - protein, 260 aa, Escherichia coli; identical to SEQ ID NO: 4546

SEQ ID NO: 20193 - protein, 229 aa, Escherichia coli; identical to SEQ ID NO: 4543

SEQ ID NO: 20194 - protein, 862 aa, Escherichia coli
MTIKSTNHLTHIATFCALLYSNSALCAELVEYDHTFLMGKDASNIDLSRYTEGNPTLPGIYDVSVYVNDQPIMSQSIAFAVIEGKKNAQACITQKNLLQFHISSPDKNSEKAILLKRDDDLGDCLNLAEMIPQSSIRYDVNDQRLDIDVPQAWIMKNYQNYVDPSLWENGINAAMLSYNLNGYHSESPGRTNDSIYAAFNGGINLGAWRLRASGNYNWITNVHSDYDFQNRYLQRDLASLRSQLVIGESYTTGETFDSVRIRGIRLYSDSRMLPPVLASFAPIIHGVANTNAKVTVMQNGYKIYETTVPPGAFAIDDLSPSGYGSDLIVTIEEADGTKRTFSQPFSSVVQMLRPGVGRWDISAGQVLKDSIQDEPNLFQASYYYGLNNYLTGYTGIQLTDNNYTAGLLGLGMNTPVGAFSVDVTHSNVSIPDDKTYQGQSYRISWNKLFENTSTSLNIAAYRYSTQHYLGLNDALTLIDEVEHPEQDLEPKSMRNYSRMKNQVTVSINQPLKFEKKDYGSFYLSGSWSDYWASGQNSTNYSIGYSNSASWGSYSISAQRSLNEDGQTDDSIYLSFTIPIENLLGTEHRSSGFQSIDTQLNSDFKGNNQLNISSSGYSDTNRISYSVNTGYMMNKSSDDLSYIGGYASYESPWGTLSGSASASSDNSRQFSLNTDGGFVLHSGGLTFSNDSFSDSDTLAVIQAPGAKGARINYGNSTVDRWGYGVTSALSPYHENRIALDINDLENDVELKSTSTVAVPRQGAVVFADFETVQGQSAIMNIVRSDGKNIPFAADIYDEQNNIIGNVGQGGQAFVRGIGQEGNIRITWIEEGKPVSCFAHYQQNTTSEKIAQSIILNGLRCQIQ

SEQ ID NO: 20195 - protein, 161 aa, Escherichia coli; identical to SEQ ID NO: 2582

SEQ ID NO: 20196 - protein, 266 aa, Escherichia coli; identical to SEQ ID NO: 3745

SEQ ID NO: 20197 - protein, 884 aa, Escherichia coli; identical to SEQ ID NO: 7254

SEQ ID NO: 20198 - protein, 678 aa, Escherichia coli; identical to SEQ ID NO: 2230

SEQ ID NO: 20199 - protein, 331 aa, Escherichia coli
MELLCPAGNLPALKAAIENGADAVYIGLKDDTNARHFAGLNFTEKKLQEAVSFVHQHRRKLHIAINTFAHPDGYARWQRAVDMAAQLGADALILADLAMLEYAAERYPHIERHVSVQASATNEEAINFYHRHFDVARVVLPRVLSIHQVKQLARVTPVPLEVFAFGSLCIMSEGRCYLSSYLTGESPNTVGACSPARFVRWQQTPQGLESRLNEVLIDRYQDGENAGYPTLCKGRYLVNGERYHALEEPTSLNTLELLPELMAANIASVKIEGRQRSPAYVSQVAKVWRQAIDRCKADPQNFIPQSAWMETLGSMSEGTQTTLGAYHRKWQ

SEQ ID NO: 20200 - protein, 250 aa, Escherichia coli; identical to SEQ ID NO: 3855

SEQ ID NO: 20201 - protein, 204 aa, Escherichia coli; identical to SEQ ID NO: 2957

SEQ ID NO: 20202 - protein, 380 aa, Escherichia coli; identical to SEQ ID NO: 7247

SEQ ID NO: 20203 - protein, 729 aa, Escherichia coli; identical to SEQ ID NO: 4557

SEQ ID NO: 20204 - protein, 656 aa, Escherichia coli
MRLKKRYLCTVLTLAFTQQAVAAQESDTLTVWSSPVSSTTTTVLDQPTMKALDKQNVAQALSVVPGVVLQKSGSRNEEQVKVRGFDSRQVPVYFDGVPIYVPYDGNLDLARILTNNLGAVEVSKGYSSLLQGPNQMGGAINITTQKPTKPLEASLGYRQGWSRSQDNAYDMHASFAASSDLGYLQVSGSQLKQDFLGLPHGVNNDIAGKHGKMINSSADDKRSIVKLGFTPRENDEYTLTYIKQDGEKDNPPYSGNSGQKSRYWQWPEYDKESFYYQGTTQLNDRFTLKSRLYRDTFENTLMMYNSLADLKNKKGSYSHYSDYSDGAGLQLAADVRENDLLSFAVNWKDDVHREKGAPHAAYDRYEDRTWSLASEYQWAAADNVDVVAGISYDWRDSVEAKKHEKDGSITHYDDNNQSAFNWQVMGKYHFANEDTLALSYYDRTRFPTLKERYTTSKPAYNQIAIVNPQLKPERARGVDLTWNGAFTHDWGFEVSVYYNRVSDAILSHNIDADTIQNQNSGTVDYSGLDAGIKGKISNILDVGLSYALIHADAKRKDIGKITDLPTQTMTAWMTLKPWEPLSVTLSEEARSSSYSNSDGSQKAAGFAVTHIRADYTLGHGFSVNASVNNLFDTKYAYSEGFIEEGRNFWAGIEYTF

SEQ ID NO: 20205 - protein, 360 aa, Escherichia coli; identical to SEQ ID NO: 3862

SEQ ID NO: 20206 - protein, 224 aa, Escherichia coli; identical to SEQ ID NO: 3792

SEQ ID NO: 20207 - protein, 241 aa, Escherichia coli; identical to SEQ ID NO: 2075

SEQ ID NO: 20208 - protein, 747 aa, Escherichia coli; identical to SEQ ID NO: 3857

SEQ ID NO: 20209 - protein, 111 aa, Escherichia coli; identical to SEQ ID NO: 3419

SEQ ID NO: 20210 - protein, 213 aa, Escherichia coli; identical to SEQ ID NO: 2232

SEQ ID NO: 20211 - protein, 249 aa, Escherichia coli; identical to SEQ ID NO: 4602

SEQ ID NO: 20212 - protein, 259 aa, Escherichia coli; identical to SEQ ID NO: 12016

SEQ ID NO: 20213 - protein, 654 aa, Escherichia coli; identical to SEQ ID NO: 3854

SEQ ID NO: 20214 - protein, 235 aa, Escherichia coli; identical to SEQ ID NO: 4365

SEQ ID NO: 20215 - protein, 700 aa, Escherichia coli; identical to SEQ ID NO: 4566

SEQ ID NO: 20216 - protein, 713 aa, Escherichia coli; identical to SEQ ID NO: 4590

SEQ ID NO: 20217 - protein, 122 aa, Escherichia coli; identical to SEQ ID NO: 2915

SEQ ID NO: 20218 - protein, 208 aa, Escherichia coli; identical to SEQ ID NO: 1948

SEQ ID NO: 20219 - protein, 682 aa, Escherichia coli; identical to SEQ ID NO: 3817

SEQ ID NO: 20220 - protein, 121 aa, Escherichia coli; identical to SEQ ID NO: 2522

SEQ ID NO: 20221 - protein, 412 aa, Escherichia coli; identical to SEQ ID NO: 7283

SEQ ID NO: 20222 - protein, 246 aa, Escherichia coli; identical to SEQ ID NO: 3838

SEQ ID NO: 20223 - protein, 660 aa, Escherichia coli; identical to SEQ ID NO: 7233

SEQ ID NO: 20224 - protein, 353 aa, Escherichia coli; identical to SEQ ID NO: 4569

SEQ ID NO: 20225 - protein, 733 aa, Escherichia coli; identical to SEQ ID NO: 4570

SEQ ID NO: 20226 - protein, 760 aa, Escherichia coli
MENNRNFPARQFHSLTFFAGLCIGITPVAQALAAEGQANADDTLVVEASTPSLYAPQQSADPKFSRPVADTTRTMTVISEQVIKDQGATNLTDALKNVPGVGAFFAGENGNSTTGDAIYMRGADTSNSIYIDGIRDIGSVSRDTFNTEQVEVIKGPSGTDYGRSAPTGSINMISKQPRNDSGIDASASIGSAWFRRGTLDVNQVIGDTTAVRLNVMGEKTHDAGRDKVKNERYGVAPSVAFGLGTANRLYLNYLHVTQHNTPDGGIPTIGLPGYSAPSAGTAALNHSGKVDTHNFYGTDSDYDDSTTDTATMRFEHDINDNTTIRNTTRWSRVKQDYLMTAIMGGASNITQPTSDVNSWTWSRTANTKDVSNKILTNQTNLTSTFYTGAIGHDVSTGVEFTRETQTNYGVNPVTLPAVNIYHPDSSIHPSGLTRNGANANGQTDTFAIYAFDTLQITRDFELNGGIRLDNYHTEYDSATACGGSGRGAITCPAGVAKGSPVTTVDTAKSGNLVNWKAGALYHLTENGNIYINYAVSQQPPGGNNFALAQSGSGNSANRTDFKPQKANTSEIGTKWQVLDKRLLLTAALFRTDIENEVEQNDDGTYSQYGKKRVEGYEISVAGNITPAWQMIGGYTQQKATIKNGKDVAQDGSSSLPYTPEHAFTLWSQYQATDDISVGAGARYIGSMHKGSDGAVGTPAFTEGYWVADAKLGYRVNRNLDFQLNVYNLFDTDYVASINKSGYRYHPGEPRTFLLTANMHF

SEQ ID NO: 20227 - protein, 362 aa, Escherichia coli; identical to SEQ ID NO: 4554

SEQ ID NO: 20228 - protein, 668 aa, Escherichia coli; identical to SEQ ID NO: 9038

SEQ ID NO: 20229 - protein, 690 aa, Escherichia coli; identical to SEQ ID NO: 12210

SEQ ID NO: 20230 - protein, 239 aa, Escherichia coli; identical to SEQ ID NO: 14867

SEQ ID NO: 20231 - protein, 222 aa, Escherichia coli; identical to SEQ ID NO: 4595

SEQ ID NO: 20232 - protein, 191 aa, Escherichia coli; identical to SEQ ID NO: 2727

SEQ ID NO: 20233 - protein, 725 aa, Escherichia coli; identical to SEQ ID NO: 2986

SEQ ID NO: 20234 - protein, 431 aa, Escherichia coli; identical to SEQ ID NO: 3408

SEQ ID NO: 20235 - protein, 244 aa, Escherichia coli; identical to SEQ ID NO: 2964

SEQ ID NO: 20236 - protein, 686 aa, Escherichia coli
MFWRDMTLSIWRKKTTGLKTKKRLLPLMLAAALCSSPVWEEEATFTANFKDTDLKSFIETVGANLNKTIIMGPGVQGKVSIRTMTPLNERQYYQLFLNLLEAQGYAVVPMENDVLKVVKSSAAKVEPLPLVGEGSDNYAGDEMVTKVVPVRNVSVRELAPILRQMIDSAGSGNVVNYDPSNVIMLTGRASVVERLTEVIQRVDHAGNRTEEVIPLDNASASEIARVLESLTKNSGENQPATLKSQIVADERTNSVIVSGDPATRDKMRRLIRRLDSEMERSGNSQVFYLKYSKAEDLVDVLKQVSGTLTAAKEEAEGTVGSGREVVSIAASKHSNALIVTAPQDIMQSLQSVIEQLDIRRAQVHVEALIVEVAEGSNINFGVQWGSKDAGLMQFANGTQIPIGTLGAAISAAKPQKGSTVISENGATTINPDTNGDLSTLAQLLSGFSGTAVGVVKGDWMALVQAVKNDSSSNVLSTPSITTLDNQEAFFMVGQDVPVLTGSTVGSNNSNPFNTVERKKVGIMLKVTPQINEGNAVQMVIEQEVSKVEGQTSLDVVFGERKLKTTVLANDGELIVLGGLMDDQAGESVAKVPLLGDIPVIGNLFKSTADKKEKRNLMVFIRPTILRDGMAADGVSQRKYNYMRAEQIYRDEQGLSLMPHTAQPILPAQNQALPPEVRAFLNAGRTR

SEQ ID NO: 20237 - protein, 673 aa, Escherichia coli; identical to SEQ ID NO: 4735

SEQ ID NO: 20238 - protein, 363 aa, Escherichia coli; identical to SEQ ID NO: 3839

SEQ ID NO: 20239 - protein, 368 aa, Escherichia coli; identical to SEQ ID NO: 2370

SEQ ID NO: 20240 - protein, 838 aa, Escherichia coli; identical to SEQ ID NO: 2916

SEQ ID NO: 20241 - protein, 878 aa, Escherichia coli; identical to SEQ ID NO: 2855

SEQ ID NO: 20242 - protein, 826 aa, Escherichia coli; identical to SEQ ID NO: 3563

SEQ ID NO: 20243 - protein, 816 aa, Escherichia coli; identical to SEQ ID NO: 3562

SEQ ID NO: 20244 - protein, 883 aa, Escherichia coli; identical to SEQ ID NO: 2822

SEQ ID NO: 20245 - protein, 207 aa, Escherichia coli; identical to SEQ ID NO: 2211

SEQ ID NO: 20246 - protein, 266 aa, Escherichia coli; identical to SEQ ID NO: 1892

SEQ ID NO: 20247 - protein, 232 aa, Escherichia coli; identical to SEQ ID NO: 2087

SEQ ID NO: 20248 - protein, 365 aa, Escherichia coli; identical to SEQ ID NO: 2106

SEQ ID NO: 20249 - protein, 551 aa, Escherichia coli; identical to SEQ ID NO: 2446

SEQ ID NO: 20250 - protein, 446 aa, Escherichia coli; identical to SEQ ID NO: 2180

SEQ ID NO: 20251 - protein, 362 aa, Escherichia coli; identical to SEQ ID NO: 2998

SEQ ID NO: 20252 - protein, 678 aa, Escherichia coli; identical to SEQ ID NO: 2902

SEQ ID NO: 20253 - protein, 180 aa, Escherichia coli
MTNTWNRLALLIFAVLSLLVAGELQAGVVVGGTRFIFPADRESISILLTNTSQESWLINSKINRPTRWAGGEASTVPAPLLAAPPLILLKPGTTGTLRLLRTESDILPVDRETLFELSIASVPSGKVENQSVKVAMRSVFKLFWRPEGCRATRWKLINNYAGHGSRRVYNSLTQRLITLT

SEQ ID NO: 20254 - protein, 879 aa, Escherichia coli; identical to SEQ ID NO: 4479

SEQ ID NO: 20255 - protein, 118 aa, Escherichia coli [sequence omitted]

SEQ ID NO: 20256 - protein, 859 aa, Escherichia coli; identical to SEQ ID NO: 4088

SEQ ID NO: 20257 - protein, 89 aa, Escherichia coli; identical to SEQ ID NO: 2812

SEQ ID NO: 20258 - protein, 760 aa, Escherichia coli; identical to SEQ ID NO: 2078

SEQ ID NO: 20259 - protein, 747 aa, Escherichia coli; identical to SEQ ID NO: 2954

SEQ ID NO: 20260 - protein, 227 aa, Escherichia coli; identical to SEQ ID NO: 3570

SEQ ID NO: 20261 - protein, 784 aa, Escherichia coli; identical to SEQ ID NO: 2240

SEQ ID NO: 20262 - protein, 274 aa, Escherichia coli; identical to SEQ ID NO: 2304

SEQ ID NO: 20263 - protein, 203 aa, Escherichia coli; identical to SEQ ID NO: 2201

SEQ ID NO: 20264 - protein, 230 aa, Escherichia coli; identical to SEQ ID NO: 2995

SEQ ID NO: 20265 - protein, 869 aa, Escherichia coli; identical to SEQ ID NO: 2903

SEQ ID NO: 20266 - protein, 229 aa, Escherichia coli; identical to SEQ ID NO: 4047

SEQ ID NO: 20267 - protein, 551 aa, Escherichia coli
MNKSVVSISAAMLVLLCQPVMGSEISPATPSDEDNYTFDPQLFRGSRFSQSSLAKLTTRESVAPGNYKMDIYTNNKLSGSWNVTFKEAADGRVLPCLTPEVADAIGLKTGEDKGEKDPVCTFAKELAPGITSQTQLSQLRLDLSVPQSQLISRPRGYVPPSELDTGASLAFMNYIANYYNVAYSGQNAHSQRSLWASFNGGINLGAWQYRQLSNMTWDNDKGNQWNNIRSYLQRPLPAINSQLMMGQLITSGRFFSGLSYHGVSLATDERMLPDSMRGYAPTIRGVAATNARVSVMQNGHEIYQTTVAPGPFEINDLYPTSYSGDLDVTVTEANGAVSRFSVPFSAVPESMRPGTSRYNVEVGKTQDSGDDSMFGDLTWQHGMTNTLTFNSGSRIADGYQALMLGGVYGSSLGAFGANLTWSHARVPESEAQSGWMSQLTWSKTFQPTSTTVSLAGYRYSTSGYRDLADVLGERHAASNKQSWDSSQWRQQSRFDLTLSQSLANYGNLFVSGSTQNYRGGKSRDTQLQLGYSNSFSHGISMNRRTPKNGRL

SEQ ID NO: 20268 - protein, 231 aa, Escherichia coli; identical to SEQ ID NO: 2868

SEQ ID NO: 20269 - protein, 252 aa, Escherichia coli; identical to SEQ ID NO: 3543

SEQ ID NO: 20270 - protein, 332 aa, Escherichia coli; identical to SEQ ID NO: 2701

SEQ ID NO: 20271 - protein, 191 aa, Escherichia coli; identical to SEQ ID NO: 2727

SEQ ID NO: 20272 - protein, 366 aa, Escherichia coli; identical to SEQ ID NO: 3520

SEQ ID NO: 20273 - protein, 162 aa, Escherichia coli; identical to SEQ ID NO: 1969

SEQ ID NO: 20274 - protein, 200 aa, Escherichia coli; identical to SEQ ID NO: 1789

SEQ ID NO: 20275 - protein, 567 aa, Escherichia coli; identical to SEQ ID NO: 3518

SEQ ID NO: 20276 - protein, 127 aa, Escherichia coli; identical to SEQ ID NO: 5431

SEQ ID NO: 20277 - protein, 512 aa, Escherichia coli; identical to SEQ ID NO: 2813

SEQ ID NO: 20278 - protein, 102 aa, Escherichia coli; identical to SEQ ID NO: 1825

SEQ ID NO: 20279 - protein, 191 aa, Escherichia coli; identical to SEQ ID NO: 2996

SEQ ID NO: 20280 - protein, 659 aa, Escherichia coli; identical to SEQ ID NO: 2942

SEQ ID NO: 20281 - protein, 359 aa, Escherichia coli; identical to SEQ ID NO: 2332

SEQ ID NO: 20282 - protein, 241 aa, Escherichia coli; identical to SEQ ID NO: 3582

SEQ ID NO: 20283 - protein, 237 aa, Escherichia coli; identical to SEQ ID NO: 2816

SEQ ID NO: 20284 - protein, 161 aa, Escherichia coli; identical to SEQ ID NO: 2582

SEQ ID NO: 20285 - protein, 828 aa, Escherichia coli; identical to SEQ ID NO: 2381

SEQ ID NO: 20286 - protein, 432 aa, Escherichia coli; identical to SEQ ID NO: 2026

SEQ ID NO: 20287 - protein, 746 aa, Escherichia coli; identical to SEQ ID NO: 2949

SEQ ID NO: 20288 - protein, 331 aa, Escherichia coli; identical to SEQ ID NO: 2856

SEQ ID NO: 20289 - protein, 233 aa, Escherichia coli; identical to SEQ ID NO: 2005

SEQ ID NO: 20290 - protein, 660 aa, Escherichia coli; identical to SEQ ID NO: 4092

SEQ ID NO: 20291 - protein, 240 aa, Escherichia coli; identical to SEQ ID NO: 4020

SEQ ID NO: 20292 - protein, 650 aa, Escherichia coli; identical to SEQ ID NO: 3057

SEQ ID NO: 20293 - protein, 89 aa, Escherichia coli; identical to SEQ ID NO: 2810

SEQ ID NO: 20294 - protein, 351 aa, Escherichia coli; identical to SEQ ID NO: 2872

SEQ ID NO: 20295 - protein, 518 aa, Escherichia coli; identical to SEQ ID NO: 2351

SEQ ID NO: 20296 - protein, 478 aa, Escherichia coli; identical to SEQ ID NO: 2409

SEQ ID NO: 20297 - protein, 715 aa, Escherichia coli; identical to SEQ ID NO: 3971

SEQ ID NO: 20298 - protein, 243 aa, Escherichia coli; identical to SEQ ID NO: 3561

SEQ ID NO: 20299 - protein, 511 aa, Escherichia coli; identical to SEQ ID NO: 2457

SEQ ID NO: 20300 - protein, 203 aa, Escherichia coli; identical to SEQ ID NO: 2009

SEQ ID NO: 20301 - protein, 233 aa, Escherichia coli; identical to SEQ ID NO: 3548

SEQ ID NO: 20302 - protein, 430 aa, Escherichia coli; identical to SEQ ID NO: 2617

SEQ ID NO: 20303 - protein, 193 aa, Escherichia coli; identical to SEQ ID NO: 2250

SEQ ID NO: 20304 - protein, 729 aa, Escherichia coli; identical to SEQ ID NO: 2948

SEQ ID NO: 20305 - protein, 696 aa, Escherichia coli; identical to SEQ ID NO: 4038

SEQ ID NO: 20306 - protein, 998 aa, Escherichia coli; identical to SEQ ID NO: 3056

SEQ ID NO: 20307 - protein, 334 aa, Escherichia coli; identical to SEQ ID NO: 2743

SEQ ID NO: 20308 - protein, 213 aa, Escherichia coli; identical to SEQ ID NO: 2232

SEQ ID NO: 20309 - protein, 367 aa, Escherichia coli; identical to SEQ ID NO: 2431

SEQ ID NO: 20310 - protein, 241 aa, Escherichia coli; identical to SEQ ID NO: 2887

SEQ ID NO: 20311 - protein, 412 aa, Escherichia coli; identical to SEQ ID NO: 2908

SEQ ID NO: 20312 - protein, 713 aa, Escherichia coli; identical to SEQ ID NO: 3523

SEQ ID NO: 20313 - protein, 228 aa, Escherichia coli; identical to SEQ ID NO: 5492

SEQ ID NO: 20314 - protein, 170 aa, Escherichia coli; identical to SEQ ID NO: 2565

SEQ ID NO: 20315 - protein, 208 aa, Escherichia coli; identical to SEQ ID NO: 1949

SEQ ID NO: 20316 - protein, 245 aa, Escherichia coli; identical to SEQ ID NO: 3527

SEQ ID NO: 20317 - protein, 614 aa, Escherichia coli; identical to SEQ ID NO: 1883

SEQ ID NO: 20318 - protein, 700 aa, Escherichia coli; identical to SEQ ID NO: 2926

SEQ ID NO: 20319 - protein, 236 aa, Escherichia coli; identical to SEQ ID NO: 3970

SEQ ID NO: 20320 - protein, 368 aa, Escherichia coli; identical to SEQ ID NO: 2371

SEQ ID NO: 20321 - protein, 917 aa, Escherichia coli
MSYLNLRLYQRNTQCLHIRKHRLAGFFVRLFVACAFAAQTPLSSAELYFNPRFLADDPQAVADLSRFENGQELPPGTYRVDIYLNNGYMATRDVTFNTGDSEQGIVPCLTRAQLASMGLNTASVSGMNLLADDACVPLTSMIHDATAHLDVGQQRLNLTIPQAFMSNRARGYIPPELWDPGINAGLLNYNFSGNSVQNRIGGNSHYAYLNLQSGLNIGAWRLRDNTTWSYNRSDRSSGSKNKWQHINTWLERDIIPLRSRLTLGDGYTQGDIFDGINFRGAQLASDDNMLPDSQRGFAPVIHGIARGTAQVTIKQNGYDIYNSTVPPGPFTINDIYAAGNSGDLQVTIKEADGSTQIFTVPYSSVPLLQREGHTRYSITAGEYRSGNAQQEKPRFFQSTLLHGLPAGWTIYGGTQLADRYRAFNFGIGKNMGALGALSVDMTQANSTLPDDSQHDGQSVRFLYNKSLNESGTNIQLVGYRYSTSGYFNFADTTYSRMNGYNIETQDGVIQVKPKFTDYYNLAYNKRGKLQLTVTQQLGRTSTLYLSGSHQTYWGTSNVDEQFQAGLNTAFEDINWTLSYSLTKNAWQKGRDQMLALNVNIPFSHWLRSDSKSQWRHASASYSMSHDLNGRMTNLAGVYGTLLEDNNLSYSVQTGYAGGGDGNSGSTGYATLNYRGGYGNANIGYSHSDDIKQLYYGVSGGVLAHANGVTLGQPLNETVVLVKAPGAKDAKVENQTGVRTDWRGYAVLPYATEYRENRVALDTNTLADNVDLDNAVANVVPTRGAIVRAEFKARVGIKLLMTLTHNNKPLPFGAMVTSESSQSSGIVADNGQVYLSGMPLVNRPGFPGECFICELRLPDHRFRWKHNKLFLLLPEEYGPAFPAIVDCYTSPPTLVWPVPLLHGFSSSYGVLPPLCKDH

SEQ ID NO: 20322 - protein, 883 aa, Escherichia coli
MTAFRAAFKAYRMHQVLIMPRFARLTIALGLATAVFPVDAEYYFNPRFLSNDLAESVDLSAFTKGREAPPGTYRVDIYLNDEFMTSRDITFIADDNNAELIPCLSTDLLVSLGIKKIALLDNKEHSAEKHVPDNSACTPLQDRLADASTEFDVGQQHLSLSVPQIYVGRMARGYVSPDLWEEGINAGLLNYSFNGNSINNRSNHNAGKSNYAYLNLQSGINIGSWRLRDNSTWSYNSGSSNSSDSNKWQHINTSAERDIIPLRSRLTVGDSYTDGDIFDSVNFRGLKINSTEAMLPDSQHGFAPVIHGIARGTAQVSVKQNGYDVYQTTVPPGPFTIDDINSAANGGDLQVTIKEADGSIQTLYVPYSSVPVLQRAGYTRYALAMGEYRSGNNLQSSPKFIQGSLMHGLEGNWTPYGGMQIAEDYQAFNLGIGKDLGLFGAFSFDITQANTTLADGTRHSGQSVKSVYSKSFYQTGTNIQVAGYRYSTQGFYNLSDSAYSRMSGYTVKPPTGDTNEQTQFIDYFNLFYSKRGQEQISISQQLGNYGTIFFSASRQSYWNTSRSDQQISFGLNVPFGDITTSLNYSYSNNIWQNDRDHLLAFTLNVPFSHWMRTDSQSAFRNSNASYSMSNDLKGGMTNLSGVYGTLLPDNNLNYSVQVGNTHGGNTSSGTSGYSSLNYRGAYGNTNVGYSRSGDSSQIYYGMSGGIIAHADGITFGQPLGDTMVLVKAPGADNVKIENQTGIHTDWRGYAILPFATEYRENRVALNANSLADNVELDETVITVIPTHGAIARATFNAQIGGKVLMTLKYGNKSVPFGAIVTHGENKNGSIVAENGQVYLTGLPQSGKLQVSWGKDKNSNCIVEYKLPEVSPGTLLNQQTAICR

SEQ ID NO: 20323 - protein, 881 aa, Escherichia coli; identical to SEQ ID NO: 16576

SEQ ID NO: 20324 - protein, 207 aa, Escherichia coli; identical to SEQ ID NO: 2211

SEQ ID NO: 20325 - protein, 237 aa, Escherichia coli; identical to SEQ ID NO: 1814

SEQ ID NO: 20326 - protein, 834 aa, Escherichia coli; identical to SEQ ID NO: 10931

SEQ ID NO: 20327 - protein, 816 aa, Escherichia coli; identical to SEQ ID NO: 2817

SEQ ID NO: 20328 - protein, 838 aa, Escherichia coli; identical to SEQ ID NO: 3764

SEQ ID NO: 20329 - protein, 869 aa, Escherichia coli; identical to SEQ ID NO: 3738

SEQ ID NO: 20330 - protein, 866 aa, Escherichia coli; identical to SEQ ID NO: 4866

SEQ ID NO: 20331 - protein, 866 aa, Escherichia coli; identical to SEQ ID NO: 12380

SEQ ID NO: 20332 - protein, 843 aa, Escherichia coli; identical to SEQ ID NO: 3163

SEQ ID NO: 20333 - protein, 266 aa, Escherichia coli; identical to SEQ ID NO: 1894

SEQ ID NO: 20334 - protein, 826 aa, Escherichia coli; identical to SEQ ID NO: 6603

SEQ ID NO: 20335 - protein, 161 aa, Escherichia coli; identical to SEQ ID NO: 2582

SEQ ID NO: 20336 - protein, 407 aa, Escherichia coli
MTERELSIIRALGEEFSTVLADLQRTFEGKMAAQAQAFEEKLASLSAVLQKHVTVDEVHPVLQAMVDDAVGTIPVPRDGRDYDPDVLQQAVNDAVANIPVPADGKSITPDDVRPMLEQMVKEAVSHIPAPRDGRDYDPEVLKQAVNDAVANIPVPADGKSITPDDVRPMLEQMVKEAVSHIPAPRDGCDYDPEVLKQAVNDAVANIPVPADGKSITPDDVRPMLEQMVKEAVSHIPAPRDGRDYDPEVLKQAVLEAVNALPAPQDGRDATALEVLPAIDDQKSFPRGTYATHLGGLWRAYEKTHGMRGWECLVDGVADIDVSMTDERLFSVVIRQSSGQCTEKTFSLPVMLYRGVFRAGKTYHPGDTVTWGGSLWHCNSMTGDKPGEAHSSGWTLAAKRGRDAGGGK

SEQ ID NO: 20337 - protein, 118 aa, Escherichia coli [sequence omitted]

SEQ ID NO: 20338 - protein, 784 aa, Escherichia coli; identical to SEQ ID NO: 3822

SEQ ID NO: 20339 - protein, 430 aa, Escherichia coli; identical to SEQ ID NO: 2617

SEQ ID NO: 20340 - protein, 551 aa, Escherichia coli; identical to SEQ ID NO: 2446

SEQ ID NO: 20341 - protein, 366 aa, Escherichia coli; identical to SEQ ID NO: 19266

SEQ ID NO: 20342 - protein, 760 aa, Escherichia coli; identical to SEQ ID NO: 6545

SEQ ID NO: 20343 - protein, 998 aa, Escherichia coli; identical to SEQ ID NO: 6557

SEQ ID NO: 20344 - protein, 162 aa, Escherichia coli; identical to SEQ ID NO: 1965

SEQ ID NO: 20345 - protein, 200 aa, Escherichia coli; identical to SEQ ID NO: 1784

SEQ ID NO: 20346 - protein, 224 aa, Escherichia coli; identical to SEQ ID NO: 3115

SEQ ID NO: 20347 - protein, 747 aa, Escherichia coli; identical to SEQ ID NO: 2072

SEQ ID NO: 20348 - protein, 274 aa, Escherichia coli; identical to SEQ ID NO: 3721

SEQ ID NO: 20349 - protein, 250 aa, Escherichia coli; identical to SEQ ID NO: 3427

SEQ ID NO: 20350 - protein, 446 aa, Escherichia coli; identical to SEQ ID NO: 2176

SEQ ID NO: 20351 - protein, 511 aa, Escherichia coli; identical to SEQ ID NO: 2457

SEQ ID NO: 20352 - protein, 89 aa, Escherichia coli; identical to SEQ ID NO: 2833

SEQ ID NO: 20353 - protein, 359 aa, Escherichia coli; identical to SEQ ID NO: 2329

SEQ ID NO: 20354 - protein, 362 aa, Escherichia coli; identical to SEQ ID NO: 2434

SEQ ID NO: 20355 - protein, 461 aa, Escherichia coli
MTERELSIIRALGEEFSTVLADLQRTFEGKMASQAQAFEEKLASLSAVLQKHVTVDEVHPVLQAMVDDAVGTIPVPRDGRDYDPDVLQQAVNDAVANIPVPADGKSITPDDVRPMLEQMVKEAVSHIPAPRDGRDYDPEVLKQAVNDAVANIPVPADGKSITPDDVRPMLEQMVKEAVSHIPAPRDGRDYDPEVLKQAVNDAVANIPVPADGKSITPDDVRPMLEQMVKEAVSHIPVPRDGRDYDPEVLQKAVNDAVANIPVPADGKSITPDDVRPMLEQMVKEAVSHIPVPRDGRDYDPDVLQKAVLDAVRALPAPQDGRDATALEIIPAIDDQKSFPRGTYATHLGGLWRAYEKTHGMRGWECLVDGVADIDVSMTGERSFTVVVRQSSGQRTEKTFSLPVMLYRGVFRAGETYHPGDTVTWGGSLWHCNSMTGDKPGEAHSSGWTLAAKRGRDAGGGK

SEQ ID NO: 20356 - protein, 432 aa, Escherichia coli; identical to SEQ ID NO: 2026

SEQ ID NO: 20357 - protein, 243 aa, Escherichia coli; identical to SEQ ID NO: 3483

SEQ ID NO: 20358 - protein, 472 aa, Escherichia coli; identical to SEQ ID NO: 7769

SEQ ID NO: 20359 - protein, 412 aa, Escherichia coli; identical to SEQ ID NO: 4058

SEQ ID NO: 20360 - protein, 387 aa, Escherichia coli; identical to SEQ ID NO: 3908

SEQ ID NO: 20361 - protein, 678 aa, Escherichia coli; identical to SEQ ID NO: 3014

SEQ ID NO: 20362 - protein, 859 aa, Escherichia coli
MWNLLRRTRKNQKSGRDVREAGWTSLFQAVAEPFSGAWQQGVKADPEAVLSFHAVFACISLISQDIAKMRLRLMQTDAHGIRRETRRGDIARLCRRPNAQQNRIQFFELWLNAKLRHGNTVVLKIRNARGQIKELRILDWSRVEPLVADDGEVFYRITPDRNCGITEAVTVPAREVIHDRFNCFFHPLVGLPPVYAAGLAATQGHHIQENSTSFFRNGGRPSGVIEIPGSITEENAKKLKSNWDSGYTGENAGKTAILSNGAKYNPTTFSPVDAQTVEQLKMTAEIVCSVFRVPAYKIGVGQPPSSDNVEALEQQYYSQCLQTLIESIELLLDEALETGENESTEFDVTTLLRMDSERRMKTLGDAVKNTLLTPNEARKRENLPPLAGGDALYLQQQNYSLEALSRRDAREDPFASAGKTVSAQLPDGASDGNKAISETEHDAVKAMFRGDTEKMTERELSIIRALGEEFSTVLADLQRTFEGKMASQAQAFEEKLTSLSAVLQKHVTVDEVRPVLQAMVDDAVGAIPVPRDGRDYDPDVLQQAVNDAVANIPQPADGKSLTPDDVRPMLEQMVKEAVSHIPVPRDGRDYDPEVLKQAVNDAVANIPQPADGKSLTPDDVRPMLEQMVKEAVSHIPVPRDGRDYDPDVLQKAVNDAVANIPQPADGKSLTPDDVRPMLEQMVKEAVSHIHVPRDGRDYDPDVLQKAVLDAVSALPAPQDGRDATALEILPAIDDQKSFPRGTYATHQGGLWRAYEKTHGMRGWECLVDGVADIDVSMTGERLFSVVVRQSSGQRTEKTFSLPVMLYRGVFRAGETYHPGDTVTWGGSLWHCNSMTEDKPGEAHSSAWTLAAKRGRDAGG

SEQ ID NO: 20363 - protein, 236 aa, Escherichia coli
MTNTWNRLTLLIFAVLSLLVAGELRAGVVVGGTRFIFPADRESISILLTNTSQESWLINSKINRPTRWAGGEASTVPAPLLAAPPLILLKPGTTGTLRLLRTESDILPVDRETLFELSIASVPSGKVENQSVKVAMRSVFKLFWRPEGLPGDPLEAYQQLRWTRNSQGVQLTNPTPYYINLIQLSVNGKALSNAGVVPPKSQRQTSWCQAIAPCHVAWRAINDYGGLSAKKEQNLP

SEQ ID NO: 20364 - protein, 213 aa, Escherichia coli; identical to SEQ ID NO: 2232

SEQ ID NO: 20365 - protein, 512 aa, Escherichia coli; identical to SEQ ID NO: 11139

SEQ ID NO: 20366 - protein, 241 aa, Escherichia coli; identical to SEQ ID NO: 2884

SEQ ID NO: 20367 - protein, 243 aa, Escherichia coli; identical to SEQ ID NO: 2910

SEQ ID NO: 20368 - protein, 729 aa, Escherichia coli
MLSTQFNRDNQYQASTKPSLLAGCIALALLPSAAFAAPATEETVIVEGSATAPDDGENDYSVTSTSAGTKMQMTQRDIPQSVTIVSQQRMEDQQLQTLGEVMENTLGISKSQADSDRALYYSRGFQIDNYMVDGIPTYFESRWNLGDALSDMALFERVEVVRGATGLMTGTGNPSAAINMVRKHATSREFKGDVSAEYGSWNKERYVADLQSPLTEDGKIRARIVGGYQNNDSWLDRYNSEKTFFSGIVDADLGDLTTLSAGYEYQHIDVNSPTWGGLPRWNTDGSSNSYDRARSTAPDWAYNDKEINKVFMTLKQRFADTWQATLNATHSEVEFDSKMMYVDAYVNKADGMLIGPYSNYGPGFDYVGGTGWNSGKRKVDALDLFADGSYELFGRQHNLMFGGSYSKQNNRYFSSWANIFPDEIGSFYNFNGNFPQTDWSPQSLAQDDTTHMKSLYAATRVTLADPLHLILGARYTNWRVDTLTYSMEKNHTTPYAGLVFDINDNWSTYASYTSIFQPQNDRDSSGKYLAPITGNNYELGLKSDWMNSRLTTTLAIFRIEQDNVAQSTGTPIPGSNGETAYKAVDGTVSKGVEFELNGAITDNWQLTFGATRYIAEDNEGNAVNPNLPRTTVKMFTSYRLPVMPELTVGGGVNWKNRVYTDTVTPYGTFRAEQGSYALVDLFTRYQVTKNFSLQGNVNNLFDKTYDTNVEGSIVYGAPRNFSITGTYQF

SEQ ID NO: 20369 - protein, 208 aa, Escherichia coli; identical to SEQ ID NO: 1949

SEQ ID NO: 20370 - protein, 663 aa, Escherichia coli; identical to SEQ ID NO: 1910

SEQ ID NO: 20371 - protein, 351 aa, Escherichia coli; identical to SEQ ID NO: 2519

SEQ ID NO: 20372 - protein, 614 aa, Escherichia coli; identical to SEQ ID NO: 3736

SEQ ID NO: 20373 - protein, 363 aa, Escherichia coli; identical to SEQ ID NO: 3347

SEQ ID NO: 20374 - protein, 565 aa, Escherichia coli; identical to SEQ ID NO: 2678

SEQ ID NO: 20375 - protein, 746 aa, Escherichia coli; identical to SEQ ID NO: 3031

SEQ ID NO: 20376 - protein, 203 aa, Escherichia coli; identical to SEQ ID NO: 2009

SEQ ID NO: 20377 - protein, 353 aa, Escherichia coli
MTERELSIIRALGEEFSTVLADLQRTFEGKMAAQAQAFEEKLASLSAVLQKHVTVDEVHPVLQAMVDDAVGTIPVPRDGRDYDPDVLQQAVNDAVANIPVPADGKSITPDDVRPMLEQMVKEAVSHIPAPRDGRDYDPEVLKQAVNDAVANIPVPADGKSITPDDVRPMLEQMVKEAVSHIPVPRDGRDYDPDVLQKAVLDAVRALPAPQDGRDATALEIIPAIDDQKSFPRGTYATHQGGLWRAYEKTHGMRGWECLVDGVADIDVSMTGERSFTVVVRQSSGQRTEKTFSLPVMLYRGVFRAGETYHPGDTVTWGGSLWHCNSMTGDKPGEAHSSGWTLAAKRGRDAGGGK

SEQ ID NO: 20378 - protein, 230 aa, Escherichia coli; identical to SEQ ID NO: 3723

SEQ ID NO: 20379 - protein, 332 aa, Escherichia coli; identical to SEQ ID NO: 2703

SEQ ID NO: 20380 - protein, 686 aa, Escherichia coli; identical to SEQ ID NO: 3129

SEQ ID NO: 20381 - protein, 232 aa, Escherichia coli; identical to SEQ ID NO: 2087

SEQ ID NO: 20382 - protein, 828 aa, Escherichia coli; identical to SEQ ID NO: 5894

SEQ ID NO: 20383 - protein, 231 aa, Escherichia coli; identical to SEQ ID NO: 3055

SEQ ID NO: 20384 - protein, 246 aa, Escherichia coli; identical to SEQ ID NO: 3021

SEQ ID NO: 20385 - protein, 191 aa, Escherichia coli; identical to SEQ ID NO: 2727

SEQ ID NO: 20386 - protein, 170 aa, Escherichia coli [sequence omitted]

SEQ ID NO: 20387 - protein, 225 aa, Escherichia coli
MLLQSDHKQNKPGYKSEHNAFAGLLKHECGGALVRKFHVASGKTYQYHVCANARDGKCNVTKNFKNIEVALYQIMKELKLEKKTSFDKTLLEERNSVKTKIQELNNMLLELPKVPLSVLQTINNLEEKLQELEEKIKHQDNIIASEKTFNINTLREIKDPQQLNMMLKRVIENIIVFNIGKRWRIKILYRNKHSQSFIWDGSNITFVSDTKKLLELVKHTPEESK

SEQ ID NO: 20388 - protein, 696 aa, Escherichia coli; identical to SEQ ID NO: 4038

SEQ ID NO: 20389 - protein, 700 aa, Escherichia coli; identical to SEQ ID NO: 12561

SEQ ID NO: 20390 - protein, 89 aa, Escherichia coli; identical to SEQ ID NO: 2811

SEQ ID NO: 20391 - protein, 731 aa, Escherichia coli; identical to SEQ ID NO: 15157

SEQ ID NO: 20392 - protein, 119 aa, Escherichia coli; identical to SEQ ID NO: 2527

SEQ ID NO: 20393 - protein, 228 aa, Escherichia coli; identical to SEQ ID NO: 3034

SEQ ID NO: 20394 - protein, 233 aa, Escherichia coli; identical to SEQ ID NO: 3276

SEQ ID NO: 20395 - protein, 193 aa, Escherichia coli; identical to SEQ ID NO: 6614

SEQ ID NO: 20396 - protein, 204 aa, Escherichia coli; identical to SEQ ID NO: 2957

SEQ ID NO: 20397 - protein, 478 aa, Escherichia coli; identical to SEQ ID NO: 2404

SEQ ID NO: 20398 - protein, 236 aa, Escherichia coli; identical to SEQ ID NO: 3286

SEQ ID NO: 20399 - protein, 334 aa, Escherichia coli; identical to SEQ ID NO: 2739

SEQ ID NO: 20400 - protein, 365 aa, Escherichia coli; identical to SEQ ID NO: 2102

SEQ ID NO: 20401 - protein, 840 aa, Escherichia coli; identical to SEQ ID NO: 9665

SEQ ID NO: 20402 - protein, 862 aa, Escherichia coli; identical to SEQ ID NO: 19460

SEQ ID NO: 20403 - protein, 368 aa, Escherichia coli; identical to SEQ ID NO: 2368

SEQ ID NO: 20404 - protein, 844 aa, Escherichia coli
MNANNLSCLIYCRCSLLLFAALGLTVTNHSFAAEEAEFDSEFLHLDKGINVIDIRRFSHGNPVPEGRYYSDIYVNNVWKGKADLQYLRTANTGAPTLCLTPELLSLIDLVKDTMSGNTSCFPASTGLSSASINFDLSTLRLNIEIPQALLNTRPRGYISPAQWQSGVPAAFINYDANYYQYNSSGTSNEQTYLGLKAGFNLWGWALRHRGSESWNNSYPAGYQNIETSIMHDLAPLRAQFTLGDFYTNGELMDSLSLRGVRLASDERMLPGSLRGYAPAVRGIANSNAKVTIYQNAHILYETTVPAGPFVINDLYPSGYAGDLIVKITESNGQTRMFTVPFAAVAQLIRPGFSRWQMSVGKYRYANKTYNDLIAQGTYQYGLTNDITLNSGLTTASGYTAGLAGLAFNTPLGAIASDITLSRTAFRYSGVTRKGYSLHSSYSINIPASNTNITLAAYRYSSKDFYHLKDALSANHNAFIDDVSVKSTAFYRPRNQFQISINQELGEKWGGMYLTGTTYNYWGHKGSRNEYQMGYSNFWKQLGYQIGLSQSRDNEQQRRDDRFYINFTLPLGGSVQSPVFSTVLNYSKEEKNSIQTSISGTGGEDNQFSYGISGNSQENGPSGYAMNGGYRSPYVNITTTVGHDTQNNNQRSFSASGAVVAHPYGVTLSNDLSDTFAIIHAEGAQGAVINNASGSRLDFWGNGIVPYVTPYEKNQISIDPSNLDLNVELSATEQEIIPRANSATLVKFDTKTGRSLLFDIRMSTGNPPPMASEVLDEHGQLAGYVAQAGKVFTRGLPEKGHLSVVWGPDNKDRCSFVYHVAHNKDDMQSQLVPVLCIQHPNQEKT

SEQ ID NO: 20405 - protein, 883 aa, Escherichia coli; identical to SEQ ID NO: 9639

SEQ ID NO: 20406 - protein, 826 aa, Escherichia coli
MLRMTPLASAIVALLIGIEAYAAEETFDTHFMIGGMKDQQVSNIRLEDNQPLPGPYDIDIYVNKQWRGKYEIIVKDNPQETCLSREMIKRLGINTDSFASGKQCLTFKQLIQGGSYTWDIGVFRLDFSVPQAWVEDLESGYVPPENWERGINAFYTSYYVSQYYSDYKASGNSKSTYVRFNSGLNLQGWQLHSDASFSKTNNNPGVWKSNTLYLERGFAQLLGTLRVGDMYTSSDIFDSVRFSGVRLFRDMQMLPNSKQNFTPRVQGIAQSNALVTIEQNGFVVYQKEVPPGPFAITDLQLAGGGADLDVSVKEADGSVTTYLVPYAAVPNMLQPGVSKYDFAAGRSHIEGASKQSDFVQAGYQYGFNNLLTLYGGSMVANNYYAFTLGTGWNTRIGAISVDATKSHSIQDNGDVFDGQSYQIAYNKFVSQTSTRFGLAAWRYSSRDYRTFNDHVWANNKDNYRRDENDIYDIADYYQNDFGRKNSFSANMSQSLPEGWGSVSLSTLWRDYWGRSGSNKDYQLSYSNNLRRISYTLAASHAYDENHHEEKRFNIFISIPFDWGDDVTTPRRQIYMSNSTTFDDQGVASNNTGLSGTVGSRDQFNYGVNLSYQYQGNETTAGANLTWNAPVATVNGSYSQSSAYRQAGASVSGGIVAWSGGVNLANRLSETFAVMNAPGIKDAYVNGQKYRTTNRNGVVVYDGMTPYRENYLMLDVSQSDSEAELRGNRKIAAPYRGAVVLVNFDTDQRKPWFIKALRADGQPLTFGYEVNDIHGHNIGVVGQGSQLFIRTNEVPPSVNVAIDKQQGLSCTITFGKEIDESRNYICQ

SEQ ID NO: 20407 - protein, 865 aa, Escherichia coli; identical to SEQ ID NO: 9877

SEQ ID NO: 20408 - protein, 102 aa, Escherichia coli; identical to SEQ ID NO: 1823

SEQ ID NO: 20409 - protein, 539 aa, Escherichia coli
MAAVCGTSGIASLFSQAAFAADSDIADGQTQRFDFSILQSMAHDLAQTAWRGAPRPLPDTLATMTPQAYNSIQYDAEKSLWHNVENRQLDAQFFHMGMGFRRRVRMFSVDPATHLAREIHFRPELFKYNDAGVDTKQLEGQSDLGFAGFRVFKAPELARRDVVSFLGASYFRAVDDTYQYGLSARGLAIDTYTDSKEEFPDFTAFWFDTVKPGATTFTVYALLDSASITGAYKFTIHCEKNQVIMDVENHLYARKDIKQLGIAPMISMFSCGTNERRMCDTIHPQIHDSDRLSMWRGNGEWICRPLNNPQKLQFNAYTDNNPKGFGLLQLDRDFSHYQDIMGWYNKRPSLWVEPRNKWGKGTIGLMEIPTTGETLDNIVCFWQPEKAVKAGDEFAFQYRLYWSAQPPVHCPLARVMATRTGMGGFPEGWAPGEHYPEKWARRFAVDFVGGDLKAAAPKGIEPVITLSSGEAKQIEILYIEPIDGYRIQFDWYPTSDSTDPVDMRMYLRCQGDAISETWLYQYFPPAPDKRQYVDDRVMS

SEQ ID NO: 20410 - protein, 360 aa, Escherichia coli; identical to SEQ ID NO: 3862

SEQ ID NO: 20411 - protein, 836 aa, Escherichia coli; identical to SEQ ID NO: 9726

SEQ ID NO: 20412 - protein, 900 aa, Escherichia coli; identical to SEQ ID NO: 9699

SEQ ID NO: 20413 - protein, 207 aa, Escherichia coli; identical to SEQ ID NO: 2224

SEQ ID NO: 20414 - protein, 246 aa, Escherichia coli; identical to SEQ ID NO: 3838

SEQ ID NO: 20415 - protein, 656 aa, Escherichia coli; identical to SEQ ID NO: 9854

SEQ ID NO: 20416 - protein, 565 aa, Escherichia coli; identical to SEQ ID NO: 2674

SEQ ID NO: 20417 - protein, 733 aa, Escherichia coli; identical to SEQ ID NO: 9713

SEQ ID NO: 20418 - protein, 237 aa, Escherichia coli; identical to SEQ ID NO: 3793

SEQ ID NO: 20419 - protein, 446 aa, Escherichia coli; identical to SEQ ID NO: 2177

SEQ ID NO: 20420 - protein, 478 aa, Escherichia coli; identical to SEQ ID NO: 2405

SEQ ID NO: 20421 - protein, 430 aa, Escherichia coli; identical to SEQ ID NO: 2617

SEQ ID NO: 20422 - protein, 250 aa, Escherichia coli; identical to SEQ ID NO: 3811

SEQ ID NO: 20423 - protein, 250 aa, Escherichia coli; identical to SEQ ID NO: 9904

SEQ ID NO: 20424 - protein, 208 aa, Escherichia coli; identical to SEQ ID NO: 1948

SEQ ID NO: 20425 - protein, 231 aa, Escherichia coli; identical to SEQ ID NO: 2864

SEQ ID NO: 20426 - protein, 478 aa, Escherichia coli; identical to SEQ ID NO: 9721

SEQ ID NO: 20427 - protein, 628 aa, Escherichia coli
MKPAASFFYCGCFTMIKKASLLTACSVTAFSAWAQDTSPDTLVVTANRFEQPRSTVLAPTTVVTRQDIDRWQSTSVNDVLRRLPGVDITQNGGSGQLSSIFIRGTNASHVLVLIDGVRLNLAGVSGSADLSQFPIALVQRVEYIRGPRSAVYGSDAIGGVVNIITTRDHPGTEISAGWGSNSYQNYDVSTQQQLGDKTRVTLLGDYAHTHGYDVVAYGNTGTQAQPDNDGFLSKTLYGALEHNFTDAWSGFVRGYGYDNRTNYDAYYSPGLPLVDTRKLYSQSWDAGLRYNGELIKSQLITSYSHSKDYNYDPHYGRYDSSATLDEMKQYTVQWANNIIIGHGNIGAGVDWQKQSTAPGTAYVEDGYDQRNTGIYLTGLQQVGDFTFEGAGRSDDNSQFGRHGTWQTSAGWEFIEGYRFIASYGTSYKAPNLGQLYGSYGNPNLNPEKSKQWEGAFEGLTAGVNWRISGYRNDVSDLIDYDDHTLKYYNEGKARIKGVEATANFDTGPLTHTVSYDYVDARNAITDTPLLRRAKQQVKYQLDWQLYDFDWGITYQYLGTRYDKDYSSYPYQTVKMGGVSLWDLAVAYPVTSHLTVRGKIANLFDKDYETVYGYQTAGREYTLSGSYTF

SEQ ID NO: 20428 - protein, 246 aa, Escherichia coli; identical to SEQ ID NO: 9505

SEQ ID NO: 20429 - protein, 432 aa, Escherichia coli; identical to SEQ ID NO: 2026

SEQ ID NO: 20430 - protein, 746 aa, Escherichia coli; identical to SEQ ID NO: 9719

SEQ ID NO: 20431 - protein, 241 aa, Escherichia coli; identical to SEQ ID NO: 9893

SEQ ID NO: 20432 - protein, 362 aa, Escherichia coli; identical to SEQ ID NO: 4554

SEQ ID NO: 20433 - protein, 840 aa, Escherichia coli; identical to SEQ ID NO: 9717

SEQ ID NO: 20434 - protein, 752 aa, Escherichia coli; identical to SEQ ID NO: 9714

SEQ ID NO: 20435 - protein, 213 aa, Escherichia coli; identical to SEQ ID NO: 2232

SEQ ID NO: 20436 - protein, 334 aa, Escherichia coli
MKKNQFLKESDVTAESVFFMKRRQVLKALGISAAAFSLPHAAHADLLSWFKGNDRPPAPAGKPLEFSKPAAWQNNLPLTPADKVSGYNNFYEFGLDKADPAANAGSLKTDPWTLKISGEVAKPLTLDHDDLTRRFPLEERIYRMRCVEAWSMVVPWIGFPLHKLLALAEPTSDAKYVAFETIYAPEQMPGQQDRFIGGGLKYPYVEGLRLDEAMHPLTLMTVGVYGKALPPQNGAPVRLIVPWKYGFKGIKSIVSIKLTRERPPTTWNLAAPDEYGFYANVNPHVDHPRWSQATERFIGSGGILDVQRQPTLLFNGYADQVASLYRGLDLRENF

SEQ ID NO: 20437 - protein, 224 aa, Escherichia coli; identical to SEQ ID NO: 3792

SEQ ID NO: 20438 - protein, 650 aa, Escherichia coli
MKGLNKITCCLLAALLMPCAGHAENEQYGANFNNADIRQFVEIVGQHLGKTILIDPSVQGTISVRSNDTFSQQEYYQFFLSILDLYGYSVITLDNGFLKVVRSANVKTSPGMIADSSRPGVGDELVTRIVPLENVPARDLAPLLRQMMDAGSVGNVVHYEPSNVLILTGRASTINKLIEVIKRVDVIGTEKQQIIHLEYASAEDLAEILNQLISESHGKSQMPALLSAKIVADKRTNSLIISGPEKARQRITSLLKSLDVEESEEGNTRVYYLKYAKATNLVEVLTGVSEKLKDEKGNSRKPSSTSAMDNVAITADEQTNSLVITADQSVQEKLATVIARLDIRRAQVLVEAIIVEVQDGNGLNLGVQWANKNVGAQQFTNTGLPVFNAAQGVADYKKNGGITSANPAWDMFSAYNGMAAGFFNGDWGVLLTALASNNKNDILATPSIVTLDNKLASFNVGQDVPVLSGSQTTSGDNVFNTVERKTVGTKLKVTPQVNEGDAVLLEIEQEVSSVDSSSNSTLGPTFNTRTIQNAVLVKTGETVVLGGLLDDFSKEQVSKVPLLGDIPLVGQLFRYTSTERAKRNLMVFIRPTIIRDDDVYRSLSKEKYTRYRQEQQLRIDGKSKALIGSEDLPVLDENTFNSHAPAPSSR

SEQ ID NO: 20439 - protein, 784 aa, Escherichia coli; identical to SEQ ID NO: 2241

SEQ ID NO: 20440 - protein, 517 aa, Escherichia coli; identical to SEQ ID NO: 2462

SEQ ID NO: 20441 - protein, 884 aa, Escherichia coli; identical to SEQ ID NO: 14714

SEQ ID NO: 20442 - protein, 760 aa, Escherichia coli; identical to SEQ ID NO: 9855

SEQ ID NO: 20443 - protein, 375 aa, Escherichia coli; identical to SEQ ID NO: 2432

SEQ ID NO: 20444 - protein, 331 aa, Escherichia coli; identical to SEQ ID NO: 2713

SEQ ID NO: 20445 - protein, 700 aa, Escherichia coli; identical to SEQ ID NO: 9825

SEQ ID NO: 20446 - protein, 244 aa, Escherichia coli; identical to SEQ ID NO: 2964

SEQ ID NO: 20447 - protein, 360 aa, Escherichia coli; identical to SEQ ID NO: 4018

SEQ ID NO: 20448 - protein, 203 aa, Escherichia coli; identical to SEQ ID NO: 2201

SEQ ID NO: 20449 - protein, 774 aa, Escherichia coli; identical to SEQ ID NO: 9718

SEQ ID NO: 20450 - protein, 715 aa, Escherichia coli; identical to SEQ ID NO: 5610

SEQ ID NO: 20451 - protein, 274 aa, Escherichia coli; identical to SEQ ID NO: 2301

SEQ ID NO: 20452 - protein, 266 aa, Escherichia coli; identical to SEQ ID NO: 1893

SEQ ID NO: 20453 - protein, 162 aa, Escherichia coli; identical to SEQ ID NO: 1965

SEQ ID NO: 20454 - protein, 729 aa, Escherichia coli; identical to SEQ ID NO: 4557

SEQ ID NO: 20455 - protein, 518 aa, Escherichia coli; identical to SEQ ID NO: 2356

SEQ ID NO: 20456 - protein, 222 aa, Escherichia coli; identical to SEQ ID NO: 1956

SEQ ID NO: 20457 - protein, 365 aa, Escherichia coli; identical to SEQ ID NO: 18393

SEQ ID NO: 20458 - protein, 118 aa, Escherichia coli [sequence omitted]

SEQ ID NO: 20459 - protein, 360 aa, Escherichia coli; identical to SEQ ID NO: 9716

SEQ ID NO: 20460 - protein, 193 aa, Escherichia coli; identical to SEQ ID NO: 2246

SEQ ID NO: 20461 - protein, 686 aa, Escherichia coli; identical to SEQ ID NO: 4535

SEQ ID NO: 20462 - protein, 713 aa, Escherichia coli; identical to SEQ ID NO: 4590

SEQ ID NO: 20463 - protein, 232 aa, Escherichia coli; identical to SEQ ID NO: 2088

SEQ ID NO: 20464 - protein, 236 aa, Escherichia coli; identical to SEQ ID NO: 3821

SEQ ID NO: 20465 - protein, 170 aa, Escherichia coli; identical to SEQ ID NO: 2565

SEQ ID NO: 20466 - protein, 678 aa, Escherichia coli; identical to SEQ ID NO: 2230

SEQ ID NO: 20467 - protein, 191 aa, Escherichia coli; identical to SEQ ID NO: 2728

SEQ ID NO: 20468 - protein, 725 aa, Escherichia coli; identical to SEQ ID NO: 9811

SEQ ID NO: 20469 - protein, 377 aa, Escherichia coli
MLQALAEQEKLNLVVSPDVSGTVSLHLTDVPWKQALQTVVKSAGLITRQEGNILSVHSVAWQNDNIARQEAEQARAQANLPLENRNITLQYADAGELAKAGEKLLSAKGSMTVDKRTNRLLLRDNKTALSTLEQWVSQMDLPVGQVELSAHIVTINEKSLRELGVKWTLADAQQAGGVGQVTTLGSDLSVATATTHIGFNIGRINGRLLDLELSALEQKQQLDIIASPRLLASHLQPASIKQGSEIPYQVSSGESGATSVEFKEAVLGMEVTPTVLQKGRIRLKLHISQNVPGQVLQQADGEVLAIDKQEIETQVEVKSGETLALGGIFTRKNKSGQDSVPLLGDIPWFGQLFRHDGKEDERRELVVFITPRLVSSE

SEQ ID NO: 20470 - protein, 229 aa, Escherichia coli
MIGGTRFAYPENQSSISVELKNTSDRDMLVKVAVSPDDARQLTGTVESLPSYSETVFIATPPLFILKPDKNTKIRINRVGGSLPADRESLFILNVAALPTLENSHSVKTDNQLQIAVRNRMKIFYRPSNLSEDPNMSYQKLRWARKNEIVTVYNPGPRYVTLYNLHVDGKVIDGGMVAPFSHRQQSWCKSQGVCEIAWQTLDIYNNVLPILKVKLNPSQLDVTGFAFSQ

SEQ ID NO: 20471 - protein, 828 aa, Escherichia coli; identical to SEQ ID NO: 2388

SEQ ID NO: 20472 - protein, 407 aa, Escherichia coli; identical to SEQ ID NO: 17673

SEQ ID NO: 20473 - protein, 351 aa, Escherichia coli; identical to SEQ ID NO: 5565

SEQ ID NO: 20474 - protein, 643 aa, Escherichia coli; identical to SEQ ID NO: 9720

SEQ ID NO: 20475 - protein, 660 aa, Escherichia coli; identical to SEQ ID NO: 5588

SEQ ID NO: 20476 - protein, 656 aa, Escherichia coli; identical to SEQ ID NO: 2901

SEQ ID NO: 20477 - protein, 663 aa, Escherichia coli; identical to SEQ ID NO: 9256

SEQ ID NO: 20478 - protein, 138 aa, Escherichia coli; identical to SEQ ID NO: 9868

SEQ ID NO: 20479 - protein, 200 aa, Escherichia coli; identical to SEQ ID NO: 1785

SEQ ID NO: 20480 - protein, 203 aa, Escherichia coli; identical to SEQ ID NO: 2008

SEQ ID NO: 20481 - protein, 696 aa, Escherichia coli; identical to SEQ ID NO: 5576

SEQ ID NO: 20482 - protein, 826 aa, Escherichia coli; identical to SEQ ID NO: 3791

SEQ ID NO: 20483 - protein, 884 aa, Escherichia coli; identical to SEQ ID NO: 7254

SEQ ID NO: 20484 - protein, 368 aa, Escherichia coli; identical to SEQ ID NO: 4616

SEQ ID NO: 20485 - protein, 843 aa, Escherichia coli; identical to SEQ ID NO: 3746

SEQ ID NO: 20486 - protein, 266 aa, Escherichia coli; identical to SEQ ID NO: 3745

SEQ ID NO: 20487 - protein, 733 aa, Escherichia coli; identical to SEQ ID NO: 4570

SEQ ID NO: 20488 - protein, 237 aa, Escherichia coli; identical to SEQ ID NO: 3793

SEQ ID NO: 20489 - protein, 729 aa, Escherichia coli; identical to SEQ ID NO: 4557

SEQ ID NO: 20490 - protein, 213 aa, Escherichia coli; identical to SEQ ID NO: 2232

SEQ ID NO: 20491 - protein, 900 aa, Escherichia coli; identical to SEQ ID NO: 4548

SEQ ID NO: 20492 - protein, 241 aa, Escherichia coli; identical to SEQ ID NO: 14984

SEQ ID NO: 20493 - protein, 541 aa, Escherichia coli; identical to SEQ ID NO: 4576

SEQ ID NO: 20494 - protein, 686 aa, Escherichia coli; identical to SEQ ID NO: 3806

SEQ ID NO: 20495 - protein, 774 aa, Escherichia coli
MTPLRVFRKTTPLVNTIRLSLLPLAGLSFSAFAAQVNIAPGSLDKALNQYAAHSGFTLSVDASLTRGKQSNGLHGDYDVESGLQQLLDGSGLQVKPLGNNSWTLEPAPAPKEDALTVVGDWLGDARENDIFEHAGARDVIRREDFAKTGATTMREVLNRIPGVSAPENNGTGSHDLAMNFGIRGLSPRLASRSTVLMDGIPVPFAPYGQPQLSLAPVSLGNMDAIDVVRGGGAVRYGPQSVGGVVNFVTRAIPQDFGIEAGVEGQLSPTSSQNNPKETHNLMVGGTADNGFGTALLYSGTRGSDWREHSATRIDDLMLKSKYAPDEVHTFNSLLQYYDGEADMPGGLSRADYDADRWQSTRPYDRFWGRRKLASLGYQFQPDSQHKFNIQGFYTQTLRSGYLEQGKRITLSPRNYWVRGIEPRYSQIFMIGPSAHEVGVGYRYLNESTHEMRYYTATSSGQLPSGSSPYDRDTRSGTEAHAWYLDDKIDIGNWTITPGMRFEHIESYQNNAITGTHEEVSYNAPLPALNVLYHLTDSWNLYANTEGSFGTVQYSQIGKAVQSGNVEPEKARTWELGTRYDDGALTAEMGLFLINFNNQYDSNQTNDTVTARGKTRHTGLETQARYDLGTLTPTLDNVSIYASYAYVNAEIREKGDTYGNLVPFSPKHKGTLGVDYKPGNWTFNLNSDFQSSQFADNANTVKESADGSTGRIPGFMLWGARVAYDFGPQIADLNLAFGVKNIFDQDYFIRSYDDNNKGIYAGQPRTLYMQGSLKF

SEQ ID NO: 20496 - protein, 713 aa, Escherichia coli; identical to SEQ ID NO: 4590

SEQ ID NO: 20497 - protein, 840 aa, Escherichia coli; identical to SEQ ID NO: 4545

SEQ ID NO: 20498 - protein, 249 aa, Escherichia coli; identical to SEQ ID NO: 4602

SEQ ID NO: 20499 - protein, 650 aa, Escherichia coli; identical to SEQ ID NO: 20438

SEQ ID NO: 20500 - protein, 331 aa, Escherichia coli; identical to SEQ ID NO: 20199

SEQ ID NO: 20501 - protein, 862 aa, Escherichia coli; identical to SEQ ID NO: 7218

SEQ ID NO: 20502 - protein, 246 aa, Escherichia coli; identical to SEQ ID NO: 3838

SEQ ID NO: 20503 - protein, 161 aa, Escherichia coli; identical to SEQ ID NO: 2582

SEQ ID NO: 20504 - protein, 362 aa, Escherichia coli; identical to SEQ ID NO: 4554

SEQ ID NO: 20505 - protein, 614 aa, Escherichia coli; identical to SEQ ID NO: 1885

SEQ ID NO: 20506 - protein, 747 aa, Escherichia coli; identical to SEQ ID NO: 3857

SEQ ID NO: 20507 - protein, 380 aa, Escherichia coli; identical to SEQ ID NO: 7247

SEQ ID NO: 20508 - protein, 208 aa, Escherichia coli; identical to SEQ ID NO: 1948

SEQ ID NO: 20509 - protein, 191 aa, Escherichia coli; identical to SEQ ID NO: 2727

SEQ ID NO: 20510 - protein, 678 aa, Escherichia coli; identical to SEQ ID NO: 2230

SEQ ID NO: 20511 - protein, 259 aa, Escherichia coli; identical to SEQ ID NO: 12016

SEQ ID NO: 20512 - protein, 224 aa, Escherichia coli; identical to SEQ ID NO: 3792

SEQ ID NO: 20513 - protein, 360 aa, Escherichia coli; identical to SEQ ID NO: 3862

SEQ ID NO: 20514 - protein, 878 aa, Escherichia coli
MSYLNLRLYQRNTQCLHIRKHRLAGFFVRLFVACAFAAQAPLSSAELYFNPRFLADDPQAVADLSRFENGQELPPGTYRVDIYLNNGYMATRDVTFNTGDSEQGIVPCLTRAQLASMGLNTASVSGMNLLADDACVPLTSMIHDATAHLDVGQQRLNLTIPQAFMSNRARGYIPPELWDPGINAGLLNYNFSGNSVQNRIGGNSHYAYLNLQSGLNIGAWRLRDNTTWSYNSSDSSSGSKNKWQHINTWLERDIIPLRSRLTLGDGYTQGDIFDGINFRGAQLASDDNMLPDSQRGFAPVIHGIARGTAQVTIKQNGYDIYNSTVPPGPFTINDIYAAGNSGDLQVTIKEADGSTQIFTVPYSSVPLLQREGHTRYSITAGEYRSGNAQQEKPRFFQSTLLHGLPAGWTIYGGTQLADRYRAFNFGIGKNMGALGALSVDMTQANSTLPDDSQHDGQSVRFLYNKSLNESGTNIQLVGYRYSTSGYFNFADTTYSRMNGYNIETQDGVIQVKPKFTDYYNLAYNKRGKLQLTVTQQLGRTSTLYLSGSHQTYWGTSNVDEQFQAGLNTAFEDSNWTLSYSLTKNAWQKGRDQMLALNVNIPFSHWLRSDSKSQWRHASASYSMSHDLNGRMTNLVGVYGTLLEDNNLSYSVQTGYAGGGDGNSGSTGYATLNYRGGYGNANIGYSHSDDIKQLYYGVSGGILAHANGVTLGQPLNETVVLVKAPGAKDAKVENQTGVRTDWRGYAVLPYATEYRENRVALDTNTLADNVDLDNAVANVVPTRGAIVRAEFKARVGIKLLMTLTHNNKPLPFGAMVTSESSQSSGIVADNGQVYLSGMPLAGKVQVKWGEEENAHCVANYQLPPESQQQLLTQLSAECR

SEQ ID NO: 20515 - protein, 222 aa, Escherichia coli; identical to SEQ ID NO: 4595

SEQ ID NO: 20516 - protein, 351 aa, Escherichia coli; identical to SEQ ID NO: 9084

SEQ ID NO: 20517 - protein, 121 aa, Escherichia coli; identical to SEQ ID NO: 2522

SEQ ID NO: 20518 - protein, 297 aa, Escherichia coli
MNKRERQPLILQRQKLSLLFRTRRGKSHQRKRRRQFQQLNNLIKERSMSYKLSCPMLVSTALMALLTTASLTAHASVTPDRTRLVFNESDKSISVTLRNNTEKLPYLAQSWLEDEKGNKITSPLAVLPPVQRIDAMMNGQVKIQALPDIHTLPSDRESLFYYNVREIPPKSGKANTLQIALQTRIKLFWRPKALEKIDMRRPWQFKVTLTRSGQDYTVNNPTPYHVIISDASTQKKGLTAAGFKPLVMPPKTSQPLKAKMASAPVLTYINDYGARMPLIFRCEGNTCKVDEDQSSKG

SEQ ID NO: 20519 - protein, 266 aa, Escherichia coli; identical to SEQ ID NO: 7272

SEQ ID NO: 20520 - protein, 472 aa, Escherichia coli
MSTIHTPLTYNEINGKPFGLDYELAKQFADYLGVKLKVTVRQNISQLFDDLDNGNADLLAAGLVYNSERVKNYQPGPTYYSVSQQLVYKVGQYRPRTLGNLTAEQLTVAPGHVVVNDLQTLKDTKFPELSWKVDDKKGSAELMEDVIEGKLDYTIADSVAISLFQRVHPELAVALDITDEQPVTWFSPLDGDNTLSAALLDFFNEMNEDGTLARIEEKYLGHGDDFDYVDTRTFLRAVDAVLPQLKPLFEKYAEEIDWRLLAAIAYQESHWDAQATSPTGVRGMMMLTKNTAQSLGITDRTDAEQSISGGVRYLQDMMSKVPESVPENERIWFALAAYNMGYAHMLDACALTAKTKGNPDSWADVKQRLPLLSQKPYYSKLTYGYARGHEAYAYVENIRKYQISLVGYLQEKEKQATEAAMQLAQDYPAVSPTELGKEKFPFLSFLSQSSSNYLTHSPSLLFSRKGSEEKQN

SEQ ID NO: 20521 - protein, 363 aa, Escherichia coli; identical to SEQ ID NO: 3839

SEQ ID NO: 20522 - protein, 760 aa, Escherichia coli
MENNRNFPARQFHSLTFFAGLCIGITPVAQALAAEGQANADDTLVVEASTPSLYAPQQSADPKFSRPVADTTRTMTVISEQVIKDQGATNLTDALKNVPAVGAFFAGENGNSTTGDAIYMRGADTSNSIYIDGIRDIGSVSRDTFNTEQVEVIKGPSGTDYGRSAPTGSINMISKQPRNDSGIDASASIGSAWFRRGTLDVNQVIGDTTAVRLNVMGEKTHDAGRDKVKNERYGVAPSVAFGLGTANRLYLNYLHVTQHNTPDGGIPTIGLPGYSAPSAGTAALNHSGKVDTHNFYGTDSDYDDSTTDTATMRFEHDINDNTTIRNTTRWSRVKQDYLMTAIMGGASNITQPTSDVNSWTWSRTANTKDVSNKILTNQTNLTSTFYTGAIGHDVSTGVEFTRETQTNYGVNPVTLPAVNIYHPDSSIHPGGLTRNGANANGQTDTFAIYAFDTLQITRDFELNGGIRLDNYHTEYDSATACGGSGRGAITCPAGVAKGSPVTTVDTAKSGNLVNWKAGALYHLTENGNIYINYAVSQQPPGGNNFALAQSGSGNSANRTDFKPQKANTSEIGTKWQVLDKRLLLTAALFRTDIENEVEQNDDGTYSQYGKKRVEGYEISVAGNITPAWQMIGGYTQQKATIKNGKDVAQDGSSSLPYTPEHAFTLWSQYQATDDISVGAGARYIGSMHKGSDGAVGTPAFTEGYWVADAKLGYRVNRNLDFQLNVYNLFDTDYVASINKSGYRYHPGEPRTFLLTANMHF

SEQ ID NO: 20523 - protein, 122 aa, Escherichia coli; identical to SEQ ID NO: 2915

SEQ ID NO: 20524 - protein, 784 aa, Escherichia coli; identical to SEQ ID NO: 2241

SEQ ID NO: 20525 - protein, 700 aa, Escherichia coli
MKIFSVRQTVLPALLVLSPVVFAADEQTMIVSAAPQVVSELDTPAAVSVVDGEEMRLATPRINLSESLTGVPGLQVQNRQNYAQDLQLSIRGFGSRSTYGIRGIRLYVDGIPATMPDGQGQTSNIDLSSVQNVEVLRGPFSALYGNASGGVMNVTTQTGQQPPTIEASSYYGSFGSWRYGLKATGATGDGTQPGDVDYTVSTTRFTTHGYRDHSGAQKNLANAKLGVRIDDASKLSLIFNSVDIKADDPGGLTEAEWKANPQQAPRAEQYDTRKTIKQTQAGLRYERSLSAQDDMSVMMYAGERETTQYQSIPMAPQLNPSHAGGVITLQRHYQGIDSRWTHRGELGVPVTFTTGLNYENMSENRKGYNNFRLNRGVPEYGQKGELRRDERNLMWNVDPYLQTQWQLTDKLSLDAGVRYSSVWFDSNDHYVTPGNGDDSGDASYHKWLPAGSLKYAMTDAWNVYLAAGRGFETPTINELSYRADGQSGMNFGLKPSTNDTIEIGSKTRIGDGLLSLALFQTDTDDEIVVDSSSGGRTTYKNAGKTRRQGAELAWDQRFAGDFRVKASWTWLDATYRSNVCNEQDCNGNRMPGIARNMAFASIGYIPEDGWYAGTEARYMGDIMADDENTAKAPSYILVGLFTGYKYNYHNLTVDLFGRVDNLFDKEYVGSVIVNESNGRYYEPAPGRNYGVGINIAWRFE

SEQ ID NO: 20526 - protein, 682 aa, Escherichia coli; identical to SEQ ID NO: 3817

SEQ ID NO: 20527 - protein, 660 aa, Escherichia coli; identical to SEQ ID NO: 7233

SEQ ID NO: 20528 - protein, 663 aa, Escherichia coli; identical to SEQ ID NO: 9256

SEQ ID NO: 20529 - protein, 720 aa, Escherichia coli
MRINKILWSLTVLLVGLNSQISVAKSSDDDNDETLVVEATAEQVLKQQPGVSVITSEDIKKTPPVNDLSDIIRKMPGVNLTGNSASGTRGNNRQIDIRGMGPENTLILIDGVPVTSRNSVRYSWRGERDTRGDTNWVPPEQVERIEVIRGPAAARYGSGAAGGVVNIITKRPTNDWHGSLSLYTNQPESSDEGATRRANFSLSGPLAGNALTTRLYGNLNKTDADSWDINSPVGTKNAAGHEGVRNKDINGVVSWKLNPQQILDFEAGYSRQGNIYAGDTQNSSSSAVTESLAKSGKETNRLYRQNYGITHNGIWDWGQSRFGVYYEKTNNTRMNEGLSGGGEGRILAGEKFTTNRLSSWRTSGELNIPLNVMVDQTLTVGAEWNRDKLDDPSSTSLTVNDSDISGISGSAADRSSKNHSQISALYIEDNIEPVPGTNIIPGLRFDYLSDSGGNFSPSLNLSQELGDYFKVKAGVARTFKAPNLYQSSEGYLLYSKGNGCPGGCYLIGNKDLDPEISVNKEIGLEFTWEDYHASVTYFRNDYQNKIVAGDNVIGQTASGAYILKWQNGGKALVDGIEASMSFPLVKDRLNWNTNATWMITSEQKDTGNPLSVIPKYTINNSLNWTITQAFSASVNWTLYGRQKPRTHAETRSEDTGGLSGKELGAYSLVGTNFNYDINKNLRLNVGVSNILNKQIFRSSEGANTYNEPGRAYYAGVTASF

SEQ ID NO: 20530 - protein, 673 aa, Escherichia coli; identical to SEQ ID NO: 4735

SEQ ID NO: 20531 - protein, 244 aa, Escherichia coli; identical to SEQ ID NO: 2964

SEQ ID NO: 20532 - protein, 746 aa, Escherichia coli
MNKKIHSLALLVNLGIYGVAQAQEPTDTPVSHDDTIVVTAAEQNLQAPGVSTITADEIRKNPVARDVSEIIRTMPGVNLTGNSTSGQRGNNRQIDIRGMGPENTLILIDGKPVSSRNSVRQGWRGERDTRGDTSWVPPEMIERIEVLRGPAAARYGNGAAGGVVNIITKKGSGEWHGSWDAYFNAPEHKEEGATKRTNFSLTGPLGDEFSFRLYGNLDKTQADAWDINQGHQSARAGTYATTLPAGREGVINKDINGVVRWDFAPLQSLELEAGYSRQGNLYAGDTQNTNSDAYTRSKYGYETNRLYRQNYSLTWNGGWDNGVTTSNWVQYEHTRNSRIPEGLAGGTEGKFNEKAAQDFVDIDLDDVMLHSEVNLPIDFLVNQTLTLGTEWNQQRMKDLSSNTQALTGTNTGGAIDGVSATDRSPYSKAEIFSLFAENNMELTDSTIVTPGLRFDHHSIVGNNWSPALNISQGLGDDFTLKMGIARAYKAPSLYQTNPNYILYSKGQGCYASAGGCYLQGNDDLKAETSINKEIGLEFKRDGWLAGVTWFRNDYRNKIEAGYVAVGQNAVGTDLYQWDNVPKAVVEGLEGSLNVPVSETVMWTNNITYMLKSENKTTGDRLSIIPEYTLNSTLSWQAREDLSMQTTFTWYGKQQPKKYNYKGQPAVGPETKEISPYSIVGLSATWDVTKNVSLTGGVDNLFDKRLWRAGNAQTTGDLAGANYIAGAGAYTYNEPGRTWYMSINTHF

SEQ ID NO: 20533 - protein, 412 aa, Escherichia coli; identical to SEQ ID NO: 7283

SEQ ID NO: 20534 - protein, 663 aa, Escherichia coli; identical to SEQ ID NO: 19837

SEQ ID NO: 20535 - protein, 204 aa, Escherichia coli; identical to SEQ ID NO: 2957

SEQ ID NO: 20536 - protein, 130 aa, Gibberella zeae
MRPSLLRLASATSTQRGLKPNPMALLPPIPLYRRLLRAHRKHLPPDMRILGDEYIKAEFRAHRKVDNPAHLIGFLTEWQMYAQKIEGDQWVGDKLDEQKLSKMSDEQIQQLYELMQAIQNRGKEGGEQES

SEQ ID NO: 20537 - protein, 62 aa, Fusarium culmorum
GSTSYIYDTSAGSGTYAYIVDTGIITSHNGFNWAANDIISKSYSNYGTVLDIFAPGTSVLSS

SEQ ID NO: 20538 - protein, 93 aa, Gibberella zeae
MSSSTPKDTVDTAETPKVKDPESQAWSDDKRRKFETKSKSEFYDPCQEAAQASYRCLFRNGGDKNMCGEYFQAYRDCKQEWTEKRRREGRGWF

SEQ ID NO: 20539 - protein, 230 aa, Fusarium solani
MKFFALTTLLAATASALPTSNPAQELEARQLGRTTRDDLINGNSASCRDVIFIYARGSTETGNLGTLGPSIASNLESAFGKDGVWIQGVGGAYRATLGDNALPRGTSSAAIREMLGLFQQANTKCPDATLIAGGYSQGAALAAASIEDLDSAIRDKIAGTVLFGYTKNLQNRGRIPNYPADRTKVFCNTGDLVCTGSLIVAAPHLAYGPDARGPAPEFLIEKVRAVRGSA

SEQ ID NO: 20540 - protein, 231 aa, Fusarium solani
MKFFALTTLLAATASALPTSHPVQELEARQLGGGTTRNDLTNGNSASCADVIFIYARGSTETGNLGTLGPSIASKLESAFGRDGVWIQGVGGAYRATLGDNSLPRGTSSAAIREMLGLFQQANTKCPDATLIAGGYSQGAALGAASVEDLDSAIRDKIAGTVLFGYTKNLQNHGRIPNFPADRTKVFCNTGDLVCTGSLIIAAPHLTYGPDARGPAPEFLIEKVRAVRGSA

SEQ ID NO: 20541 - protein, 231 aa, Fusarium solani
MKFFALTTLLAATDSALPTSHPVQELEARQLGGGTTRNDLTNGNSASCADVIFIYARGSTETGNLGTLGPSIASKLESAFGRDGVWIQGVGGAYRATLGDNSLPRGTSSAAIREMLGLFQQPNTKCPDATLIAGGYSQGAALAAASVEDLDSAIRDKIAGTVLFGYTKNLQNHGRIPNFPADRTKVFCNTGDLVCTGSLIIAAPHLTYGPDARGPAPEFLIEKVRAVRGSA

SEQ ID NO: 20542 - protein, 230 aa, Fusarium solani
MKFFALTTFLAATASALPTSNPAQELEARQLGRTTRDDLINGNSASCADVIFIYARGSTETGNLGTLGPSIASNLESAFGTDGVWIQGVGGAYRATLGDNALPRGTSSAAIREMLGLFQQANTKCPDATLIAGGYSQGAALAAASIEDLDSAIRDKIAGTVLFGYTKNLQNRGRIPNYPADRTKVFCNVGDLVCTGSLIVAAPHLAYGPDARGPAPEFLIEKVRAVRGSA

SEQ ID NO: 20543 - protein, 316 aa, Nectria haematococca
MPVSKSVSPPKRTLLLAPPTLASHSSALSSVLADYDRSVTDLQMLDRLSAGLVKLPSSTYDRVLILADASFMLGESLALMNRAVLGPVAEALKPNGRLQSQDGNSLEESTLSKEAVLAGLVASRGGFEKPDYGDNEGAVTLKFGLKKKNQPAPLADGSVPLNFKKKKPVEVKPVVPVVPAGVGFIDLSDDLDDDDLIDEDTLMTEEDLLRPINIPVECQPKAGKRRRACKDCSCGLAERLVKEDAEKRAEADKKLESVKLATDDLAEIDFTVQGKVGSCGNCSLGDAFRCDGCPYIGLPPFKPGEEVRLLNNDVQL

SEQ ID NO: 20544 - protein, 153 aa, Gibberella zeae
MVTELPYALDAETPLNPSELNVLKAQYDREGEMVGVQTKFNYAWGLVKSNQRNDQQLGVRLLSDIFRVSPERRRECLYYLALGNYKLGNYGEARRYNDLLLDKEPANLQASNLRSLIDDKVAREGLMGVAILSGVGVAAGVVGAFLLRNARKR

SEQ ID NO: 20545 - protein, 680 aa, Gibberella zeae
MKHLLTLALCFSSINAVAVTVPHKAVGTGIPEGSLQFLSLRASAPIGSAISRNNWAVTCDSAQSGNECNKAIDGNKDTFWHTFYGANGDPKPPHTYTIDMKTTQNVNGLSMLPRQDGNQNGWIGRHEVYLSSDGTNWGSPVASGSWFADSTTKYSNFETRPARYVRLVAITEANGQPWTSIAEINVFQASSYTAPQPGLGRWGPTIDLPIVPAAAAIEPTSGRVLMWSSYRNDAFGGSPGGITLTSSWDPSTGIVSDRTVTVTKHDMFCPGISMDGNGQIVVTGGNDAKKTSLYDSSSDSWIPGPDMQVARGYQSSATMSDGRVFTIGGSWSGGVFEKNGEVYSPSSKTWTSLPNAKVNPMLTADKQGLYRSDNHAWLFGWKKGSVFQAGPSTAMNWYYTSGSGDVKSAGKRQSNRGVAPDAMCGNAVMYDAVKGKILTFGGSPDYQDSDATTNAHIITLGEPGTSPNTVFASNGLYFARTFHTSVVLPDGSTFITGGQRRGIPFEDSTPVFTPEIYVPEQDTFYKQNPNSIVRVYHSISLLLPDGRVFNGGGGLCGDCTTNHFDAQIFTPNYLYNSNGNLATRPKITRTSTQSVKVGGRITISTDSSISKASLIRYGTATHTVNTDQRRIPLTLTNNGGNSYSFQVPSDSGVALPGYWMLFVMNSAGVPSVASTIRVTQ

SEQ ID NO: 20546 - protein, 627 aa, Gibberella zeae
MATVRICVCGDESTGKSSLIASLVKDQFVNNKIQPVLPQITIPPSIGTPENVSTTIVDTSARPQDRTTLRKEIRKCNVILLVYADHYSYERVALFWMPYFRSLGVNVPVVLCANKSDLVGQGTTPQVVEEELLPVMAEFREVDSCIRTSARDHRNVNEVFFLCQKAVTHPIAPLFDYKEGHLKPLCINALKRIFYLCDKDQDGYLNEQEMRDFQARCFDKPLTTDDLDNIKLSIAKSLPASDLEKGIDLPGFLQLNKLYAEKGRHETIWIILRKFHYTDSLSLEDKFIRPKFEVPEYSSAELSPAGYRFFVDLFLIFDKDNDGGLNDEELEALFAPAPGLPSSWTDSSFPSSTVRNEAGHVTLQGWLAQWSMTTFIEPKTTIEYLAYLGFEPSNPKDSITAALKITKPRKRRSRLGRVERNVVLCYVLGASGAGKSALLDSFLNRPFYGLYHPTIKPRRAVNSVELPGGKQVYLILEELGELEPAILENRAKLDACDLICYAYDSSDPDSFSHIVDLRKKYPHLDELPSIYTALKADKDKTNQRCELQPDQYTSSLSMSLPLHVSVTWGSISELFVAYADAATTPSTAFPRSNEEGPDRTSLYIALGATACAGVAALTIWRRATNAL

SEQ ID NO: 20547 - protein, 462 aa, Fusarium oxysporum
MAYKLILAAFAATALAAPVEERQSCSNGVWAQCGGQNWSGTPCCTSGNKCVKLNDFYSQCQPGSAEPSSTAAGPSSTTATKTTATGGSSTTAGGSVTSAPPAASDNPYAGVDLWANNYYRSEVMNLAVPKLSGAKATAAAKVADVPSFQWMDTYDHISLMEDTLADIRKANKAGGKYAGQFVVYDLPNRDCAAAASNGEYSLDKDGANKYKAYIAKIKGILQNYSDTKVILVIEPDSLANLVTNLNVDKCAKAESAYKELTVYAIKELNLPNVSMYLDAGHGGWLGWPANIGPAAKLYAQIYKDAGKPSRVRGLVTNVSNYNGWKLSTKPDYTESNPNYDEQRYINAFAPLLAQEGWSNVKFIVDQGRSGKQPTGQKAQGDWCNAKGTGFGLRPSTNTGDALADAFVWVKPGGESDGTSDTSAARYDYHCGLDDALKPAPEAGTWFQAYFEQLLDNANPSFL

SEQ ID NO: 20548 - protein, 385 aa, Fusarium oxysporum
MHTLSVLLALAPVSALAQAPIWGQCGGNGWTGATTCASGLKCEKINDWYYQCVPGSGGSEPQPSSTQGGGTPQPTGGNSGGTGLDAKFKAKGKQYFGTEIDHYHLNNNPLINIVKAQFGQVTCENSMKWDAIEPSRNSFTFSNADKVVDFATQNGKLIRGHTLLWHSQLPQWVQNINDRSTLTAVIENHVKTMVTRYKGKILQWDVVNNEIFAEDGNLRDSVFSRVLGEDFVGIAFRAARAADPAAKLYINDYNLDKSDYAKVTRGMVAHVNKWIAAGIPIDGIGSQGHLAAPSGWNPASGVPAALRALAASDAKEIAITELDIAGASANDYLTVMNACLAVPKCVGITVWGVSDKDSWRPGDNPLLYDSNYQPKAAFNALANAL

SEQ ID NO: 20549 - protein, 376 aa, Fusarium oxysporum
MRSYTLLALAGPLAVSAASGSGHSTRYWDCCKPSCSWSGKAAVNAPALTCDKNDNPISNTNAVNGCEGGGSAYACTNYSPWAVNDELAYGFAATKISGGSEASWCCACYALTFTTGPVKGKKMIVQSTNTGGDLGDNHFDLMMPGGGVGIFDGCTSEFGKALGGAQYGGISSRSECDSYPELLKDGCHWRFDWFENADNPDFTFEQVQCPKALLDISGCKRDDDSSFPAFKGDTSASKPQPSSSAKKTTSAAAAAQPQKTKDSAPVVQKSSTKPAAQPEPTKPADKPQTDKPVATKPAATKPAQPVNKPKTTQKVRGTKTRGSCPAKTDATAKASVVPAYYQCGGSKSAYPNGNLACATGSKCVKQNEYYSQCVPN

SEQ ID NO: 20550 - protein, 514 aa, Fusarium oxysporum
MYRIVATASALIAAARAQQVCSLNTETKPALTWSKCTSSGCSDVKGSVVIDANWRWTHQTSGSTNCYTGNKWDTSICTDGKTCAEKCCLDGADYSGTYGITSSGNQLSLGFVTNGPYSKNIGSRTYLMENENTYQMFQLLGNEFTFDVDVSGIGCGLNGAPHFVSMDEDGGKAKYSGNKAGAKYGTGYCDAQCPRDVKFINGVANSEGWKPSDSDVNAGVGNLGTCCPEMDIWEANSISTAFTPHPCTKLTQHSCTGDSCGGTYSSDRYGGTCDADGCDFNAYRQGNKTFYGPGSNFNIDTTKKMTVVTQFHKGSNGRLSEITRLYVQNGKVIANSESKIAGNPGSSLTSDFCSKQKSVFGDIDDFSKKGGWNGMSDALSAPMVLVMSLWHDHHSNMLWLDSTYPTDSTKVGSQRGSCATTSGKPSDLERDVPNSKVSFSNIKFGPIGSTYKSDGTTPNPPASSSTTGSSTPTNPPAGSVDQWGQCGGQNYSGPTTCKSPFTCKKINDFYSQCQ

SEQ ID NO: 20551 - protein, 392 aa, Nectria haematococca
MKFSQASLLAACLPAISARFIETAEADNVILKPDELYLIETAPGKTQWVTEDQKWELRRNGQRFMDITDTPSLGSTRLNAQTVSFPKKCVKQDEVADLSKNLEKKNMKANLEKLTSFHTRYYKSNYGLESSDWVLEKVNQIIKDAGAQDTVYAESFPHTWQQHSVIATIPGQSNSTVVIGAHQDSINLFLPSILAAPGADDDGSGTVTIMEVFRALLNSKDVVDGKAPNTIEFHWYSAEEGGLLGSQAIFQSYEQSGRDIKAMLQQDMTGYVQKTLDAGQPESVGVITDFVDPGLTTFIKTVVEEYCNIPWVETKCGYACSDHASASKAGYPSAFVIESAFEYSDPHIHTTDDNIKYLSFDHMLEHARMTLGLVYELGFYDFSDSSEDRGDL

SEQ ID NO: 20552 - protein, 637 aa, Nectria haematococca
MRSVDSLLLLGLTGLASQANAHPAKRQPNDSPLSKRGVDLDAFRLPELAKYVPQDEVPDISNARIAPSSDYTKTAEEFVKSVVGKATFRLVSDHYVGTNGVAHVRFKQTVNDIDVDNADFNVNIGADGKVFSYGNSFYTGKIPGPLVKRDTSDPVTALKSTVEVLDLPVDASDAKAEPKGDEHYTFTDTSGTVKKPEAKLVYLIDGEQNLKLTWRVETDVLDNWLLTYVDADKTEKVVGVVDYVADLATYEVYPWGVNDPSKGSRSVVEDPWNIATSEFTWISDGSANYTTTRGNNAIAQVNPSGGTAYLNNYRPSSSSLEFEYTFSTTQTDPVSYRDASITQLFYTANKYHDLLHLLGFNEAAGNFEVNNNGQGGAGNDFVILNSQDGSGTNNANFATPADGSPGRMRMYLWTYSTPRRDSSFDAGVVIHEYTHGLSNRLTGGPANAGCLSGTESGGMGEGWSDFMATAVHLGARDTRSTNHVIGDWVYNNANGIRAYPYSTSLTTNPYTYRSVNSLSGVHAVGTYWATALYEVLWNLIDKHGKNDADTPTFDSNGVPTDGKYLAMKLVIDGMALQPCNPNMVQARDAILDADVALTGGDNQCELWTGFAKRGLGTGARYSSTSRTESFALPSGVC

SEQ ID NO: 20553 - protein, 373 aa, Gibberella fujikuroi
MVRNIVSRLCSQLFALPSSSLQERDPCSVTEYSGLATAVSSCKNIVLNGFQVPTGKQLDLSSLQNDSTVTFKGTTTFATTADNDFNPIVISGSNITITGASGHVIDGNGQAYWDGKGSNSNSNQKPDHFIVVQKTTGNSKITNLNIQNWPVHCFDITGSSQLTISGLILDNRAGDKPNAKSGSLPAAHNTDGFDISSSDHVTLDNNHVYNQDDCVAVTSGTNIVVSNMYCSGGHGLSIGSVGGKSDNVVDGVQFLSSQVVNSQNGCRIKSNSGATGTINNVTYQNIALTNISTYGVDVQQDYLNGGPTGKPTNGVKISNIKFIKVTGTVASSAQDWFILCGDGSCSGFTFSGNAITGGGKTSSCNYPTNTCPS

SEQ ID NO: 20554 - protein, 248 aa, Fusarium oxysporum
MVKFASVVALVAPLAAAAPQEIPNIVGGTSASAGDFPFIVSISRNGGPWCGGSLLNANTVLTAAHCVSGYAQSGFQIRAGSLSRTSGGITSSLSSVRVHPSYSGNNNDLAILKLSTSIPSGGNIGYARLAASGSDPVAGSSATVAGWGATSEGGSSTPVNLLKVTVPIVSRATCRAQYGTSAITNQMFCAGVSSGGKDSCQGDSGGPIVDSSNTLIGAVSWGNGCARPNYSGVYASVGALRSFIDTYA

SEQ ID NO: 20555 - protein, 327 aa, Fusarium oxysporum
AASGLEAAMKAAGKQYFGTALTVRNDQGEIDIINNKNEIGSITPENAMKWEAIQPNRGQFNWGPADQHAAAATSRGYELRCHTLVWHSQLPSWVANGNWNNQTLQAVMRDHINAVMGRYRGKCTHWDVVNEALNEDGTYRDSVFLRVIGEAYIPIAFRMALAADPTTKLYYNDYNLEYGNAKTEGAKRIARLVKSYGLRIDGIGLQAHMTSESTPTQNTPTPSRAKLASVLQGLADLGVDVAYTELDIRMNTPATQQKLQTNADAYARIVGSCMDVKRCVGITVWGISDKYSWVPGTFPGEGSALLWNDNFQKKPSYTSTLNTINRR

SEQ ID NO: 20556 - protein, 371 aa, Fusarium oxysporum
MVRNIAIAALLPAAFASTLPKRDPCSVTDYSGLATAVSSCTNIVLNGFQVPTGKALDLSKLKDGATVTFKGKTTFATTADNDFDPIVISGNGITITGASGHVIDGNGPAYWDGEGSNNKDNPKPDHFIVVKKTTGNSKITNLNIQNWPVHCFDITGSSQLTISGLILDNRLGDKPNAKSGSLPAAHNSDGFDISSSDHVTLDNIHVYNQDDCVAVTSGTNIIVSNMYCSGGHGLSIGSVGGKSNNVVNGVQFLDSQIVNSENGCRIKSNSGTTGTIANVTYQNISLTNISKYGVDVQQDYLNGGPTGKPTNGVKISGIKFIKVTGTVASSAQDWYILCGDGSCSGFTFSGNAITGGGKTSSCNYPTNTCPS

SEQ ID NO: 20557 - protein, 512 aa, Gibberella zeae
MYRAIATASALIAAVRAQQVCSLTQESKPSLNWSKCTSSGCSNVKGSVTIDANWRWTHQVSGSTNCYTGNKWDTSVCTSGKVCAEKCCLDGADYASTYGITSSGDQLSLSFVTKGPYSTNIGSRTYLMEDENTYQMFQLLGNEFTFDVDVSNIGCGLNGALYFVSMDADGGKAKYPGNKAGAKYGTGYCDAQCPRDVKFINGQANSDGWQPSDSDVNGGIGNLGTCCPEMDIWEANSISTAYTPHPCTKLTQHSCTGDSCGGTYSNDRYGGTCDADGCDFNSYRQGNKTFYGPGSGFNVDTTKKVTVVTQFHKGSNGRLSEITRLYVQNGKVIANSESKIAGVPGNSLTADFCTKQKKVFNDPDDFTKKGAWSGMSDALEAPMVLVMSLWHDHHSNMLWLDSTYPTDSTKLGSQRGSCSTSSGVPADLEKNVPNSKVAFSNIKFGPIGSTYKSDGTTPTNPTNPSEPSNTANPNPGTVDQWGQCGGSNYSGPTACKSGFTCKKINDFYSQCQ

SEQ ID NO: 20558 - protein, 457 aa, Gibberella zeae
MTAYKLFLAAAFAATALAAPVEERQSCSNGVWSQCGGQNWSGTPCCTSGNKCVKVNDFYSQCQPGSADPSPTSTIVSATTTKATTTGSGGSVTSPPPVATNNPFSGVDLWANNYYRSEVSTLAIPKLSGAMATAAAKVADVPSFQWMDTYDHISFMEDSLADIRKANKAGGNYAGQFVVYDLPDRDCAAAASNGEYSLDKDGKNKYKAYIADQGILQDYSDTRIILVIEPDSLANMVTNMNVPKCANAASAYKELTIHALKELNLPNVSMYIDAGHGGWLGWPANLPPAAQLYGQLYKDAGKPSRLRGLVTNVSNYNAWKLSSKPDYTESNPNYDEQKYIHALSPLLEQEGWPGAKFIVDQGRSGKQPTGQKAWGDWCNAPGTGFGLRPSANTGDALVDAFVWVKPGGESDGTSDTSAARYDYHCGIDGAVKPAPEAGTWFQAYFEQLLKNANPSFL

SEQ ID NO: 20559 - protein, 455 aa, Fusarium oxysporum
MLFNNVLSAVAVSALVSSVVGTSSRNSALPKRPHVEAAPYGTGKAFPASPARSRKDFCYVNPGKGKNVDDAPSILKAFKKCNKGGTIVLDQKYSIASPLDLTWLAHVDVIITGEVNFKSDPYYWADHSFKYDFQNMSSFWKIGGKDIHIYGDLTKGESLLDGHGQAYWEEMAVNKTLLRPILLTIEDAHGLTMSNLRMRNPPNWFNIIINSTDVLISDLDLEAKSLNGVKIANSDGWDTYRSDRIVIQNSVIDNTDDCVSFKPNSTNVVVQNLVCNGSHGISVGSLGQYKGETDIVENLYIYNISMSNASDGARIKVWPGVETAFQSLLNGGGGLGRVRNVTYDTFYHENNDNAITITQCYGQKNQTLCNEFPANLTIEDVTMKNFWGTVSTKYDPRAGSLVCSAPDRCSNIVAEDIKVQVPSKKPPVYDCQNIDTSTLDITCRDPTNARDTTNG

SEQ ID NO: 20560 - protein, 455 aa, Fusarium oxysporum; identical to SEQ ID NO: 20559

SEQ ID NO: 20561 - protein, 360 aa, Fusarium oxysporum
MFSSTVLLSGLVASVLAAPALEPRAGSCTFTDAATAIKNKAGCSTITLNNIAVPAKTTLDLTKLNDGTHVIFQGKTTFGYAEWEGPLISFTGNNLLIEGAAGHSIDCEGKRWWDGKGSNGGKKKPKFFSAHSLKNSNIKNLNVLNTPVQAFSINSVTNLGVYGVHMDNSLGDSLGGHNTDAFDVGSSTGVYISGAVVKNQDDCLAINSGTNITFTGGNCSGGHGLSIGSVGGRSDNTVKTVRILNSSISNSDNGVRIKTVSGATGSVSDVKYDTITLSNIAKYGIVIEQDYENGSPTGTPTAGVPITDVTINKVTGTVKSSGTDVYILCANCKNWTWTNNKVTGGKTSTKCKGIPSGASC

SEQ ID NO: 20562 - protein, 360 aa, Fusarium oxysporum; identical to SEQ ID NO: 20561

SEQ ID NO: 20563 - protein, 455 aa, Fusarium oxysporum
MLFNNVLSAVAVSVLVSSVVGTSSRNSALPKRPHVEAAPYGTGKAFPASPARSRKDFCYVNPGKGKNVDDAPSILKAFKKCNKGGTIVLDQKYSIASPLDLTWLAHVDVIITGEVNFKSDPYYWADHSFKYDFQNMSSFWKIGGKDIHIYGDLTKGESLLDGHGQAYWEEMAVNKTLLRPILLTIEDAHGLTMSNLRMRNPPNWFNIIINSTDVLISDLELEAKSLNGVKIANSDGWDTYRSDRIVIQNSVIDNTDDCVSFKPNSTNVVVQNLVCNGSHGISVGSLGQYKGETDIVENLYIYNISMSNASDGARIKVWPGVETAFQSLLNGGGGLGRVRNVTYDTFYHENNDNAITITQCYGQKNQTLCNEFPANLTIEDVTMKNFWGTVSTKYDPRAGSLVCSAPDRCSNIVAEDIKVQVPSKKPPVYDCQNIDTSTLDITCRDPTNARDTTNG

SEQ ID NO: 20564 - protein, 360 aa, Fusarium oxysporum
MFSSTVLLSGLVASVLAAPALEPRAGSCTFTDAATAIKNKAGCSTITLNNIAVPAKTTLDLTKLNDGTHVIFQGKTTFGYAEWEGPLISFTGNNLLIEGAAGHSIDCEGKRWWDGKGSNGGKKKPKFFSAHSLKNSNIKNLNVLNTPVQAFSINSVTNLGVYGVHMDNSLGDSLGGHNTDAFDVGSSNGVYISGAVVKNQDDCLAINSGTNITFTGGNCSGGHGLSIGSVGGRSDNTVKTVRILNSSISNSDNGVRIKTVSGATGSVSDVKYDTITLSNIAKYGIVIEQDYENGSPTGTPTAGVPITDVTINKVTGTVKSSGTDVYILCANCKNWTWTNNKVTGGKTSTKCKGIPSGASC

SEQ ID NO: 20565 - protein, 370 aa, Fusarium oxysporum
MVRNIAIAALLPAAFASTLPRDPCSVTDYSGLATAVSSCTNIVLNGFQVPTGKALDLSKLKDGATVTFKGKTTFATTADNDFDPIVISGNGITITGASGHVIDGNGPAYWDGEGSNNKDNPKPDHFIVVKKTTGNSKITNLNIQNWPVHCFDITGSSQLTISGLILDNRLGDKPNAKSGSLPAAHNSDGFDISSSDHVTLDNIHVYNQDDCVAVTSGTNIIVSNMYCSGGHGLSIGSVGGKSNNVVNGVQFLDSQIVNSENGCRIKSNSGTTGTIANVTYQNISLTNISKYGVDVQQDYLNGGPTGKPTNGVKISGIKFIKVTGTVASSAQDWYILCGDGSCSGFTFSGNAITGGGKTSSCNYPTNTCPS

SEQ ID NO: 20566 - protein, 371 aa, Fusarium oxysporum; identical to SEQ ID NO: 20556

SEQ ID NO: 20567 - protein, 374 aa, Gibberella fujikuroi
MVRNIALAALLPAAWALPSSSLQERDACTVTDYSGLATAVSSCTNIVLAGFQVPTGKQLDLSKLKAGTTVTFKGKTTFATTADNDFDPIVISGSGITITGASGHVIDGNGQAYWDGQGSNNQDNPKPDHFIVVKKTTGNSKITNLNIQNWPVHCFDITGSSDLTISGLILDNRAGDKPNAKSGGLPAAHNSDGFDISSSDHVTLDNNYVYNQDDCVAVTSGTNIIVSNMYCSGGHGLSIGSVGGKSNNVVDGVQFLNSQIVNSENGCRIKSNSGTTGTINNVTYQNIALTNISKYGVDVQQDYLNGGPTGKPTNGVKISNIKFTKVTGTVASSAQNWYILCGDGSCSGFTFSGNAITGGGKTSSCNYPTNTCPS

SEQ ID NO: 20568 - protein, 360 aa, Fusarium oxysporum
MFSSTVLLSGLVASVLAAPALEPRAGSCTFTDAATAIKNKAGCSTITLNNIVVPAKTTLDLTKLNDGTHVIFQGKTTFDYAEWEGPLISFTGNNLLIEGAAGHSIDCEGKRWWDGKGSNGGKKKPKFFSAHSLKNSNIKNLNVLNTPVQAFSINSVTNLGVYGVHMDNSLGDSLGGHNTDAFDVGSSNGVYISGAVVKNQDDCLAINSGTNITFTGGNCSGGHGLSIGSVGGRSDNTVKTVRILNSSISNSDNGVRIKTVSGATGSVSDVKYDTITLSNIAKYGIVIEQDYENGSPTGTPTAGVPITDVTINKVTGTVKSSGTDVYILCANCKNWTWTNNKVTGGKTSTKCKGIPSGASC

SEQ ID NO: 20569 - protein, 455 aa, Fusarium oxysporum
MLFNNVLSAVAVSALVSSVVGTSSRNSALPKRPHVEAAPYGTGKAFPASPARSRKDFCYVNPGKGKNVDDAPSILKAFKKCNKGGTIVLDQKYSIASPLDLTWLAHVDVVITGEVNFKSDPYYWADHSFKYDFQNMSSFWKIGGKDIHIYGDLTKGESLLDGHGQAYWEEMAVNKTLLRPILLTIEDAHGLTMSNLRMRNPPNWFNIIINSTDVLISDLNLQAKSLNGVKIANSDGWDTYRSDRIVIQNSVIDNTDDCVSFKPNSTNVVVQNLVCNGSHGISVGSLGQYKGETDIVENLYIYNISMSNASDGARIKVWPGVETAFQSLLNGGGGLGRVRNVTYDTFYHENNDNAITITQCYGQKNQTLCNEFPANLTIEDVTMKNFWGTVSTKYDPRAGSLVCSAPDRCSNIVAEDIKVQVPSKKPPVYDCQNIDTSTLDITCRDPTNARDTTNG

SEQ ID NO: 20570 - protein, 455 aa, Fusarium oxysporum
MLFNNVLSAVAVSALVSSVVGTSSRNSALPKRPHVEAAPYGTGKAFPASPARSRKDFCYVNPGKGKNVDDAPSILKAFKKCNKGGTIVLDQKYSIASPLDLTWLAHVDVIITGEVNFKSDPYYWADHSFKYDFQNMSSFWKIGGKDIHIYGDLTKGESLLDGHGQAYWEEMAVNKTLLRPILLTIEDAHGLTMSNLRMRNPPNWFNIIINSTDVLISDLDLEAKSLNGVKIANSDGWDTYRSDRIVIQNSVIDNTDDCVSFKPNSTNVVVQNLVCNGSHGISVGSLGQYKGETDIVENLYIYNISMSNASDGARIKVWPGVETAFQSLLNGGGGLGRVRNVTYDTFYHENNDNAITITQCYGQKNQTLCNEFPANLTIEDVTMKNFWGTVSTKYDPRAGSLVCSAPDRCSNIVAEDIKVQVPSKKPPVYDCQNIDTSTLDITCRDPTSARDTTNG

SEQ ID NO: 20571 - protein, 360 aa, Fusarium oxysporum
MFSSTVLLSGLVASVLAAPALEPRASSCTFTDAATAIKNKAGCSTITLNNIAVPAKTTLDLTKLNDGTHVIFQGKTTFGYAEWEGPLISFTGNNLLIEGAAGHSIDCEGKRWWDGKGSNGGKKKPKFFSAHSLKNSNIKNLNVLNTPVQAFSINSVTNLGVYGVHMDNSLGDSLGGHNTDAFDVGSSTGVYISGAVVKNQDDCLAINSGTNITFTGGNCSGGHGLSIGSVGGRSDNTVKTVRILNSSISNSDNGVRIKTVSGATGSVSDVKYDTITLSNIAKYGIVIEQDYENGSPTGTPTAGVPITDVTINKVTGTVKSSGTDVYILCANCKNWTWTNNKVTGGKTSTKCKGIPSGASC

SEQ ID NO: 20572 - protein, 360 aa, Fusarium oxysporum; identical to SEQ ID NO: 20561

SEQ ID NO: 20573 - protein, 455 aa, Fusarium oxysporum; identical to SEQ ID NO: 20570

SEQ ID NO: 20574 - protein, 455 aa, Fusarium oxysporum
MLFNNVISAVAVSALVSSVVGTSSRNSALPKRPHVEAAPYGTGKAFPASPARSRKDFCYVNPGKGKNVDDAPSILKAFKKCNKGGTIVLDQKYSIASPLDLTWLAHVDVIITGEVNFKSDPYYWADHSFKYDFQNMSSFWKIGGKDIHIYGDLTKGESLLDGHGQAYWEEMAVNKTLLRPILLTIEDAHGLTMSNLRMRNPPNWFNIIINSTDVLISDLDLEAKSLNGVKIANSDGWDTYRSDRIVIQNSVIDNTDDCVSFKPNSTNVVVQNLVCNGSHGISVGSLGQYKGETDIVENLYIYNISMSNASDGARIKVWPGVETAFQSLLNGGGGLGRVRNVTYDTFYHENNDNAITITQCYGQKNQTLCNEFPANLTIEDVTMKNFWGTVSTKYDPRAGSLVCSAPDRCSNIVAEDIKVQVPSKKPPVYDCQNIDTSTLDITCRDPTSARDTTNG

SEQ ID NO: 20575 - protein, 360 aa, Fusarium oxysporum; identical to SEQ ID NO: 20561

SEQ ID NO: 20576 - protein, 455 aa, Fusarium oxysporum; identical to SEQ ID NO: 20563

SEQ ID NO: 20577 - protein, 371 aa, Fusarium oxysporum; identical to SEQ ID NO: 20556

SEQ ID NO: 20578 - protein, 370 aa, Fusarium oxysporum; identical to SEQ ID NO: 20565

SEQ ID NO: 20579 - protein, 360 aa, Fusarium oxysporum; identical to SEQ ID NO: 20564

SEQ ID NO: 20580 - protein, 360 aa, Fusarium oxysporum; identical to SEQ ID NO: 20561

SEQ ID NO: 20581 - protein, 455 aa, Fusarium oxysporum
MLFNNVLSAVAVSALVSSVVGTSSRNSALPKRPHVEAAPYGTGKAFPASPARSRKDFCYVNPGKGKNVDDAPSILKAFKKCNKGGTIVLDQKYSIASPLDLTWLAHVDVIITGEVNFKSDPYYWADHSFKYDFQNMSSFWKIGGKDIHIYGDLTKGESLLDGHGQAYWEEMAVNKTLLRPILLTIEDAHGLTMSNLRMRNPPNWFNIIINSTDVLISDLNLQAKSLNGVKIANSDGWDTYRSDRIVIQNSVIDNTDDCVSFKPNSTNVVVQNLVCNGSHGISVGSLGQYKGETDIVENLYIYNISMSNASDGARIKVWPGVETAFQSLLNGGGGLGRVRNVTYDTFYHENNDNAITITQCYGQKNQTLCNEFPANLTIEDVTMKNFWGTVSTKYDPRAGSLVCSAPDRCSNIVAEDIKVQVPSKKPPVYDCQNIDTSTLDITCRDPTNARDTTNG

SEQ ID NO: 20582 - protein, 274 aa, Fusarium oxysporum
ISGNGITITGASGHVIDGNGPAYWDGEGSNNKDNPKPDHFIVVKKTTGNSKITNLNIQNWPVHCFDITGSSQLTISGLILDNRLGDKPNAKSGSLPAAHNSDGFDISSSDHVTLDNIHVYNQDDCVAVTSGTNIIVSNMYCSGGHGLSIGSVGGKSNNVVNGVQFLDSQIVNSENGCRIKSNSGTTGTIANVTYQNISLTNISKYGVDVQQDYLNGGPTGKPTNGVKISGIKFIKVTGTVASSAQDWYILCGDGSCSGFTFSGNAITGGGKTSS

SEQ ID NO: 20583 - protein, 371 aa, Fusarium oxysporum
MVRNIAIAALLPAAFASTLPKRDPCSVTDYSGLATAVSSCTNIVLNGFQVPTGKALDLSKLKDGATVTFKGKTTFATTADNDFDPIVISGNGITITGASGHVIDGNGPAYWDGEGTNNKDNPKPDHFIVVKKTTGNSKITNLNIQNWPVHCFDITGSSQLTISGLILDNRLGDKPNAKSGSLPAAHNSDGFDISSSDHVTLDNIHVYNQDDCVAVTSGTNIIVSNMYCSGGHGLSIGSVGGKSNNVVNGVQFLDSQIVNSENGCRIKSNSGTTGTIANVTYQNISLTNISKYGVDVQQDYLNGGPTGKPTNGVKISGIKFIKVTGTVASSAQDWYILCGDGSCSGFTFSGNAITGGGKTSSCNYPTNTCPS

SEQ ID NO: 20584 - protein, 360 aa, Fusarium oxysporum; identical to SEQ ID NO: 20561

SEQ ID NO: 20585 - protein, 360 aa, Fusarium oxysporum; identical to SEQ ID NO: 20561

SEQ ID NO: 20586 - protein, 455 aa, Fusarium oxysporum; identical to SEQ ID NO: 20559

SEQ ID NO: 20587 - protein, 360 aa, Fusarium oxysporum; identical to SEQ ID NO: 20561

SEQ ID NO: 20588 - protein, 374 aa, Gibberella moniliformis
MVRNIAIAALLPAAWALPSSSLQERDACTVTDYSGLATAVSSCTNIVLAGFQVPTGKQLDLSKLKAGTTVTFKGKTTFATTADNDFDPIVISGSGITITGASGHVIDGNGQSYWDGEGSNNKDNPKPDHFIVVKKTTGNSKITNLNIQNWPVHCFDITGSSQLTISGLILDNRAGDKPNAKSGSLPAAHNSDGFDISSSDHVTLDNNHVYNQDDCVAVTSGTNIVVSNMYCSGGHGLSIGSVGGKSDNVVDGVQFLNSQIVNSENGCRIKSNSGTTGTINNVTYQNIALTNISKYGVDVQQDYLNGGPTGKPTNGVKISNIKFTKVTGTVASSAQNWYILCGDGSCSGFTFSGNAITGGGKTSSCNYPSNTCPS

SEQ ID NO: 20589 - protein, 374 aa, Gibberella moniliformis
MVRNIAIAALLPAAWALPSSSLQERDACTVTDYSGLATAVSSCTNIVLAGFQVPTGKQLDLSKLKAGTTVTFKGKTTFATTADNDFDPIVISGSGITITGASGHVIDGNGQAYWDGEGSNNKDNPKPDHFIVVKKTTGNSKITNLNIQNWPVHCFDITGSSQLTISGLILDNRAGDKPNAKSGSLPAAHNSDGFDISSSDHVTLDNNHVYNQDDCVAVTSGTNIVVSNMYCSGGHGLSIGSVGGKSDNVVDGVQFLNSQIVNSENGCRIKSNSGTTGTINNVTYQNIALTNISKYGVDVQQDYLNGGPTGKPTNGVKISNIKFTKVTGTVASSAQNWYILCGDGSCSGFTFSGNAITGGGKTSSCNYPSNTCPS

SEQ ID NO: 20590 - protein, 242 aa, Fusarium solani
MKFTAAFVAALVGTSSAAVTKTLPKSAGATSFPTAVPVKGSYDGGMKRFEREPKVCKGQDETGEKDAMFILENGATLSNVIIGASQAEGVHCKGTCTLNNVWWADVCEDAVTLKQTSGTSYINGGGAFHASDKIIQFNGRGTVHVKDFYAEDYGKLSRSCGNCKDNGGPRNVIVENSVAVDGGVLCGINTNYGDTCKVINSCQDKGKYCDRYEGNSSGKEPTKIGSGPDGKYCTVTGSTTSC

SEQ ID NO: 20591 - protein, 360 aa, Fusarium oxysporum
MFSSTVLLSGLVASVLAAPALEPRAGSCIFTDAATAIKNKAGCSTITLNNIAVPAKTTLDLTKLNDGTHVIFQGKTTFGYAEWEGPLISFTGNNLLIEGAAGHSIDCEGKRWWDGKGSNGGKKKPKFFSAHSLKNSNIKNLNVLNTPVQAFSINSVTNLGVYGVHMDNSLGDSLGGHNTDAFDVGSSTGVYISGAVVKNQDDCLAINSGTNITFTGGNCSGGHGLSIGSVGGRSDNTVKTVRILNSSISNSDNGVRIKTVSGATGSVSDVKYDTITLSNIAKYGIVIEQDYENGSPTGTPTAGVPITDVTINKVTGTVKSSGTDVYILCANCKNWTWTNNKVTGGKTSTKCKGIPSGASC

SEQ ID NO: 20592 - protein, 449 aa, Fusarium oxysporum
MLFNNVLSAVAVSALVSSVVGTSSRNSALPKRPHVEAAPYGTGKAFPASPARSRKDFCYVNPGKGKNVDDAPSILKAFKKCNKGGTIVLDQKYSIASPLDLTWLAHVDVIITGEVNFKSDPYYWADHSFKYDFQNMSSFWKIGGKDIHIYGDLTKGESLLDGHGQAYWEEMAVNKTLLRPILLTIEDAHGLTMSNLRMRNPPNWFNIIINSTDVLISDLDLEAKSLNGVKIANSDGWDTYRSDRIVIQNSVIDNTDDCVSFKPNSTNVVVQNLVCNGSHGISVGSLGQYKGETDIVENLYIYNISMSNASDGARIKVWPGVETAFQSLLNGGGGLGRVRNVTYDTFYHENNDNAITITQCYGQKNQTLCNEFPANLTIEDVTMKNFWGTVSTKYDPRAGSLVCSAPDRCSNIVAEDIKVQVPSKKPPVYDCQNIDTSTLDITCRDPTNG

SEQ ID NO: 20593 - protein, 230 aa, Fusarium oxysporum
MKFSIISTLLAATASALPAGQDAAALEARQLGGSITRNDLANGNSGSCPGVIFIYARGSTESGNLGTLGPRVASKLEAKYGKNGVWIQGVGGAYRATLGDNALPRGTSSAAIREMLGHFNDANQKCPDAVLIAGGYSQGAALAAASVTDVDPGIREKIAGVVLFGYTKNLQNRGKIPSYPEDRTKVFCNTGDLVCTGSLIVAAPHLAYQSAASGAAPEFLIQKADAAGAA

SEQ ID NO: 20594 - protein, 374 aa, Fusarium subglutinans
MVRNIALAALLPAAWALPSSSLQERDACTVTDYSGLATAVSSCTNIVLNGFQVPTGKQLDLSKLKAGSTVTFKGKTTFATTADNDFDPIVISGSGITITGASGHVIDGNGQAYWDGQGSNNADNPKPDHFIVVKKVTGTSKITNLNIQNWPVHCFDITGSSDLTISGLILDNRAGDKPNSKSGGLPAAHNSDGFDISSCDHVTLDNNHVYNQDDCVAVTSGTNIIVSNMYCSGGHGLSIGSVGGKSNNVVDGVQFLNSQIVNSENGCRIKSNSGTTGTINNVTYQNIALTNISKYGVDVQQDYLNGGPTGKPTNGVKISNIKFTKVTGTVASSAQNWYILCGVGSCSGFTFSGNAITGGGKTSSCNYPTNTCPS

SEQ ID NO: 20595 - protein, 374 aa, Fusarium subglutinans
MVRNIALAALLPAAWALPSSSLQERDACTVTDYSGLATAVSSCTNIVLNGFQVPTGKQLDLSKLKAGSTVTFKGKTTFATTADNDFDPIVISGSGITITGASGHVIDGNGQAYWDGQGSNNADNPKPDHFIIVKKVTGTSKITNLNIQNWPVHCFDITGSSDLTISGLILDNRAGDKPNSKSGGLPAAHNSDGFDISSCDHVTLDNNHVYNQDDCVAVTSGTNIVVSNMYCSGGHGLSIGSVGGKSNNVVDGVQFLNSQIVNSENGCRIKSNSGTTGTINNVTYQNIALTNISKYGVDVQQDYLNGGPTGKPTNGVKISNIKFTKVTGTVASSAQNWYILCGVGSCSGFTFSGNAITGGGKTSSCNYPTNTCPS

SEQ ID NO: 20596 - protein, 374 aa, Fusarium subglutinans
MVRNIAIAALLPAAWALPSSSLQERDACTVTDYSGLATAVSSCTNIVLNGFQVPTGKQLDLSKLKAGSTVTFKGETTFATTADNDFDPIVISGSGITITGASGHVIDGNGQAYWDGQGSNNADNPKPDHFIVVKKVTGTSKITNLNIQNWPVHCFDINGSSDLTISGLILDNRAGDKPNSKSGGLPAAHNSDGFDISSCDHVTLDNNHVYNQDDCVAVTSGTNIVVSNMYCSGGHGLSIGSVGGKSNNVVDGVQFLNSQIVNSENGCRIKSNSGTTGTINNVTYQNIALTNISKYGVDVQQDYLNGGPTGKPTNGVKISNIKFTKVTGTVASSAQNWYILCGVGSCSGFTFSGNAITGGGKTSSCNYPTNTCPS

SEQ ID NO: 20597 - protein, 374 aa, Gibberella intermedia
MVRNIAIAALLPAAWALPSSSLQERDACIVTDYSGLATAVSSCTNIVLAGFQVPTGKQLDLSKLKAGTTVTFKGKTTFATTADNDFDPIVISGSGVTITGASGHVIDGNGQAYWDGQGSNNQDNPKPDHLIVVKKTTGNSKITNLNIQNWPVHCFDITGSSDLTISGLILDNRAGDKPNAKSGGLPAAHNSDGFDISSSDHVTLDNNHVYNQDDCVAVTSGTNIIVSNMYCSGGHGLSIGSVGGKSNNVVDGVQFLNSQIVNSENGCRIKSNSGTTGTINNVTYQNIALTNISKYGVDVQQDYLNGGPTGKPTNGVKISNIKFTKVTGTVASSAQNWYILCGDGSCSGFTFSGNAITGGGKTSSCNYPTNTYPS

SEQ ID NO: 20598 - protein, 374 aa, Gibberella intermedia
MVRNIAIAALLPAAWALPSSSLQERDACTVTDYSGLATAVSSCTNIVLAGFQVPTGKQLDLSKLKAGTTVTFKGKTTFATTADNDFDPIVISGSGVTITGASGHVIDGNGQAYWDGQGSNNQDNPKPDHFIVVKKTTGNSKITNLNIQNWPVHCFDITGSSDLTISGLILDNRAGDKPNAKSGGLPAAHNSDGFDISSSDHVTLDNNHVYNQDDCVAVTSGTNIIVSNMYCSGGHGLSIGSVGGKSNNVVDGVQFLNSQIVNSENGCRIKSNSGTTGTINNVTYQNIALTNISKYGVDVQQDYLNGGPTGKPTNGVKISNIKFTKVTGTVASSAQNWYILCGDGSCSGFTFSGNAITGGGKTSSCNYPTNTCPS

SEQ ID NO: 20599 - protein, 374 aa, Gibberella intermedia
MVRNIAIAALLPAAWALPSSSLQERDACTVTDYSGLATAVSSCTNIVLAGFQVPTGKQLDLSKLKAGTTVTFKGKTTFATTADNDFDPIVISGSGVTITGASGHVIDGNGQAYWDGEGSNNKDNPKPDHFIVVKKTTGNSKITNLNIQNWPVHCFDITGSSDLTISGLILDNRAGDKPNAKSGGLPAAHNSDGFDISSSDHVTLDNNHVYNQDDCVAVTSGTNIIVSNMYCSGGHGLSIGSVGGKSNNVVDGVQFLNSQIVNSENGCRIKSNSGTTGTINNVTYQNIALTNISKYGVDVQQDYLNGGSTGKPTNGVKISNIKFTKVTGTVASSAQNWYILCGDGSCSGFTFSGNAITGGGKTSSCNYPTNTCPS

SEQ ID NO: 20600 - protein, 834 aa, Fusarium oxysporum
MLPPESGIDAWLRYAPLSETLRSLHKPVSSIIALSTNPTCPVSVAGEELRCGLERILGQIVQVDSDLRADTKGSIVVGTLSALKANGGEDLVQSVPVLDEDGFWLDTNVDGNNNIHIVGQNERGALYGAFEYLSLLAQGKLAKTNVQQAYHPGAAIRYVNEWDNLDGSIERGYGGKSIFFRDGEILTDLSRVRQYARLLASVRINGCIVNNVNSSHNLLNNTNLDGLGRVADVMRPYGIRIGVSLFFDTPRGLAGLPTSDPLDPDVIKFWEEITAKLYKRVPDMLGYTIKANSEGQPGPLTYGRTLAQGANMFARALKPHGDGVVMYRAFVYNHHLDESDLKNDRANAAVEYFAHLDGEFEDNVIIQIKFGPIDFQVREPPSTLFAHLRKTPMICEFMVCQEYLGQQSHYVYMAPEWETILGFDMRIDDKPSLVRDIASGKVYGMNKGGYAAVTNIGDDLTWLGHHLSMSNLYAYGRLCWDAAAPAQDILLDWIRLTFTAENQKVIDTIREIGMESWPTYEAYSGNLGIQTLCDILYTHYGPSPGSQDGNGWGQWTRADSKALGMDRTAATGTGYAAQYPPQVAAQFERIETTPDDLLLWFHHVPYTHKLKSGKTIIQHIYDAHYEGSANAQTFVTRWASLKGLIDDARFEHVAFKLAYQAGHSLVWRDSVNNFYLAKCGIPDEKNRVGNYLWRIEAESMQLSGYTVVDVTPPEAASLGRAIVASSLERAVATTKLRFPSGKRDIAVNYFDHTGGHARYELLLDGKMVREWKSDLDTRLGHDFSEYLDGHSATRVYLRGVDVREGAELTIIGYPDGKDMASLDYISVLPEGVVD

SEQ ID NO: 20601 - protein, 549 aa, Fusarium oxysporum
MHKTTLLGLLASSPVSAQLHSLAQAAGLKYFGSAVDNGYLSDAPYSKLADDVEEFGQLVPENGQKWETVEPKQGDFVYTTADVVPDLAKKNGQILRCHALTWHSQLPTWVSSGAFSAEELTEVIEAHIANVVEHYKGDCYAWDVVNEAIDDNAEWRDSVFSRTLGTDFLGISFKAARKADPAAKLYYNDYNLEQNGAKTDKAVELVKLLQKEGAPIDGVGFQGHLIVGQTPSRSELAATFKRFTDLNVEVAITELDIRHESVPASAAELKTQGDEYADVVGACLDTKGCVGVTVWGITDKYSWIPGVFEGNGEALLYTDDYEKKPAWTSVSSLLAAAATKAPATSSVAPVETTAPATTLETKTKPVYTVPGTTNYMNTTAPQTEQTRTALATETDDNDDNCAETEAPFPTYAIPTNGTQVYPTKAPVDDDSDDDCAETEAPIPTQAPVPSGDCDEDDGEFEPTVAAIEPTTRVPVIRSSSAYTYKWNTETTAPQVPAPTGTAPAYPVGTGSGGVVKHYYQCGGKNYKGPTECEKPYKCVEHNEYYFQCV

SEQ ID NO: 20602 - protein, 394 aa, Fusarium oxysporum
MHTLSVLLALAPVSALAQAPIWGQCGGNGWTGATTCASGLKCEKINDWYYQCVPGSGGSEPQPSSTQGGGTPQPTGGNSGGTGLDAKFKAKGKQYFGTEIDHYHLNNNPLINIVKAQFGQVTCENSMKWDAIEPSRNSFTFSNADKVVDFATQNGKLIRGHTLLWHSQLPQWVQNINDRSTLTAVIENHVKTMVTRYKGKILQWDVVNEIFAEDGNLRDSVFSRVLGEDFVGIAFRAARAADPAAKLYINDYNLDKSDYAKLTRGMVAHVNKWIAAGIPIDGIGSQGHLAAPSGWNPASGVPAALRALAASDAKEIAITELDIAGASANDYLTVMNACLAVPKCVGITVWGVSDKDSWRPGENPLLYDSNYQPKAAFNALVNALMEVTGYVLTI

SEQ ID NO: 20603 - protein, 382 aa, Fusarium oxysporum
MKSLFALSLFAGLSVAQNAAWAQCGGNGWTGSKTCVSGYKCTVVNEWYSQCIPGTAEEPTTTLKTTTGGGSTPTGTPGNGKFLWVGTNEAGGEFGEGSLPGTWGKHFIFPDPAAVDTLISQGYNAFRVQLRMERTNPSSMTGPFDTAYLKNLTTIVDHITGKGANVILDPHNYGRYFDKIITSTSDFQTWWKNFATQFKSNSKVIFDTNNEYNTMDQTLVLNLNQAAINGIRAAGATQTIFVEGNQWSGAWSWPDVNDNMKALTDPLDKIVYEMHQYLDSDSSGTSPNCVSTTIGVERVKAATEWLRKNKKIGMIGELAGGPNDTCKTAVKNMLDYLKENSDVWKGVTWWAAGPWWADYMFSFEPPSGTGYQYYNSLLKTYI

SEQ ID NO: 20604 - protein, 842 aa, Fusarium oxysporum
MWLSTLLFALFTCVIAEDGIDGWLRYARLPSSVSINAKSLPRKIHIIGGSKKSPLGSAASELQKGFSGILNIDLKTETNSKSCDFSQSIVVTTEENLKKSCKGKLSHHKLEADGYWLSTSGNSVTIIGQNERGALYGAFEYLSMLGQGNFKKVEYASNPSAPIRWANQWDNLNASSTHGSIERGYGGPSIFFDGVKNVRKDLSRVPLFGRLLASIGINAVVINNVNADVRLFNSENRKGLIEIADLLRPWGVQVGLSLNFASPQLLGGLDTFDPLDEKVIKWWHELTDGLYDGIPDMAGYLVKANSEGQPGPITYNRTLADGANMFAKALEPHGGVVMFRAFVYDKLDWNDWKADRANAAVEFFKELDGKFDDNVVVQIKYGPIDFQIREPVSPLFSHLRKTNSAIELQISQEYLGQQCHLVYLPPLWKTILDFDMRIDGKKSQVRDIVSGKVFKRRLGGYAGVTNVGLDKTWLGSHLSMSNLYAFGRLAWDPTADSQEILEDWTRLTFGLDDKVRKAIADMSMASWPAYENYSGNLGIQTLTDILYAHYGPNPASQDNNGWGQWTRATRDHIGMDRTVKNGTGNAGQYPSEVAKRFESTETTPDDLMLWFHHVPYTFKLHSGKTVIQHFYDAHYKGAATAQTFHKTWASLKGKIDDDRLDHDLFRLKYQAGHSIVWRDAINEFYRNLSGIPDKQNRVRNHPYRIEAEKMELDGYKPVNVTPTETASKYVAIYTNSTGTASTTLKSPKGTYNLAVNYYDIVGGKSTWSVYLNKRLIGKWVGDNEERLGHWPSEFLDGHSATRITFEGVKIQPGDKLVIIGKADGKETAALDYVSVLPQGIVD

SEQ ID NO: 20605 - protein, 423 aa, Fusarium oxysporum
MKFASIVAAAFASAPALAWGTDHYADVKLGLQLAKDAGLKVMRTWAFHDNNRTYVSGGLPQYGTGAENTVMQFFEKDGSVKIDLSKLDVVIEAAEATNMKLILALTNNWADYGGMDVYTVNLGGRYHDDFYRLPAIKKAFKNYISAVVNRYKDSPAVFAWEIANEPRCGADGTRNLPRGPDCTPATITSWVSEMSTYIKSLDPNHLVTTGSEGGFNRQSDDWTYNGADGTDFDAEIKLPNIDFNTFHSYPQYWSKTTDWVVQWIKDHAAAGATAKKPVLHEEYGWTDKSTRIATLSKWQKASLDLEVSDMYWQFGTSKFSYGKNHDDRNTIYLEDDEAQPLVYEHAAAVNAANGGAAPTKPTTTATATSKPSTTLSTTSKPTVTGGPTVPRYGQCGGASWTGPTVCASPYTCKEQNQWYSQCL

SEQ ID NO: 20606 - protein, 232 aa, Fusarium oxysporum
MKFTIITALLAASASALPTDQDTAAAIEARQFGGSSTRNDLSNGNSASCPPVIFIYARGSTETGNLGTLGPNIASKLEAKYGKSGVWIQGVGGAYRATLGDNALPRGTSTVAIREMVGLFNTANTKCPDATLIAGGYSQGAALAAASITDIGSAIREKIAGTVLFGYTKNQQNNGRIPSYPTERTKVFCNAGDLVCTGSLIIAGPHLMYQIAAAGAAPEFLIQRVAAVQGSS

SEQ ID NO: 20607 - protein, 407 aa, Fusarium oxysporum
MRASTISAIFSGLAVSITAQSDLDGSVWKALLAEPQSKRGFSDMPRNRPVKRQSGWNPPADLKAPLQEVWEHYEKTYDGGLDANVNTGFHQIMANKGYLNICVRWDSSAAITEAQRTKIASAYNAQYQKWFKWLYGYNGFPYDDVKVNIVAYAVKDKSQLQGSTAGYEVYTELDADGVPMCPVACARDAHLDGDYSGCKAGADRHYDHSLWLKDGLEGGFGHNWGQEVGREYFMNNLDSDSIHILLHEMGHTFALDDFYDWTPTGVTKFIMLAGASMEITDFDGWMYRNWWYYLSQKNNWSSSKSSSNAAPVSSESKPSVNTAAPVKAPTKTASPKPSTSTTKATVAKPTSTKKATATKVPSTEKSSGAEAAAWGQCGGNNWTGATKCASGTKCTKHNDYYSQCVAN

SEQ ID NO: 20608 - protein, 395 aa, Fusarium oxysporum
MSYKTLFLLGLATIALALPSDRVSKEGLVAGKFIVALKPTANVDLDLHARWVSDVHGQALARRGVESGGIDKTFSFPGFQGYSGVFDDNTIEIIKANSSVLHVEREQSFTIASPVTQQSPPWGLSAISNANPSSSKASYTYDSTAGAGTFVYVLDSGIYLEHEEFQGRAVFGADTSGVSSKKQHGTLVAAIVNGATYGVAKKATVVDVQVLGDDGGSSSGVLAGLSWTVNDVVSKNRAGKAVINMSLSGANSVIFNEAVQKAIDAGIPVVAAAGNANEDASKSSPGNQPNVITVAASNKDYQRWAWSNWGPACDIFAPGEQITSAWPTSASATYIASGTSEASPHVAGVIAYLFALEGSRTPAQIWSRLQELAIKDKITDVKGVPNLLVYNGIGK

SEQ ID NO: 20609 - protein, 300 aa, Fusarium oxysporum
MQLTSIISFWLLALFSTVLGAEVVPRGQLKEVTSYGNNPTGTKMFLYVPKNLKSNPAVVVALHYCTGTAQAYYQGTKWASNAEKYGFIVVYPQTPYTPGNCWDVSSKMTLKHEGGGCSTSIANMAKFVLKEYNGDAKKVFVTGESSGAMMTNVMLATYPDVFAAGSAYAGVPAGCFVSQQNQAAAWNSTCSQGKSIYTQTQWANVVKNMYPGYNGARPKFQIYHGTADPTLNVQNYYEEIKQWTGVFGYSSNPQSSTPNTPASPFTRQVFGEKFQAFLGQGITHGVPHFDDNDLKWFGII

SEQ ID NO: 20610 - protein, 250 aa, Fusarium oxysporum
MMTFGTTLVIRIIWLFASCLNSFKKAGYLFLWHHLHDPYRTTNSHLTTMKNLLFPLTALLIGSSLAADVTITAPVSIPSNEPEYKEGKSFTSAVLNSTNFYREEHNATALKWNKTLEEFATDYLDDNDDCDFEHSGGPYGENLAIGYPNVTASVEAWGDEREEYNFDKAKFSKKTGHFTQLVWKDTTTVGCGRKLCGERGWFLVCEYWPRGNVEGQFKEEVSKEEGGAFSTRPGLGLALALFIGYMLVVV

SEQ ID NO: 20611 - protein, 240 aa, Fusarium oxysporum
MKYTAILALAGVSSAAVTKTLPKSAGATSFPTAVPVKGSYDGGMKRFERSPSVCQGQTETGEKDAMFILENGATLSNVIIGASQAEGVHCKGTCTLNNVWWADVCEDAVTLKQTSGTSYINGGGAFHASDKIVQFNGRGTVQIKDFYAEDYGKLVRSCGNCKDNGGPRNVVISGSVAVDGGVLCGINTNYGDTCKITSSCQNKGKYCDRYEGNSSGAEPSKIGSGPDGKYCTTSGVTTSC

SEQ ID NO: 20612 - protein, 477 aa, Fusarium oxysporum
MRSLQIISVLGALFLTTVQAVTLPAGVPRDISEFRDKHPYAPPKHEHRRIVRIRASRNNADDVSDEFRRGVRKANGGGTLHLAKGKTYVIGKALDLTGLEDIHIHLEGEIRFTNDVEYWQENAWYHPFQKSIMFWKWGGKDIKIYGNGVIEGQGQRWWNEFESGTGSILNPDNKYYRPILFYAENTTNLDVSGIHLKDSPCWNNFIVSSNNVKYTDVVATALSNNGSIIPKNTDFMNTMNTSAVRIERTWVNIDDDCFSPKPNSSDLYVNTMYCNGTHGQSMGSLGQYKGEVSNVYDVHIENVWMMNGDYSAARIKVWAGEETGTGFVNNVTFKNFWVARMDYGIFLDSCYFNISAEECNAHPSGMQITNIHFENFTGYTSGVYGNAVARLSCSAAEDAICANITVKDFNVKTPCGGDPVIICDGMHGDIGVDCVPYDSDKAKAALNAKCKTPMAAIDTDPWGSGLIEKMKGAFHPQ

SEQ ID NO: 20613 - protein, 231 aa, Fusarium oxysporum
MHFPSTIALLTALPSVLACKGYTGGLPKHTGTKTLSAPQYIKKGQTFDAGWVKYDRGVKCTGQDEGGEKDTVFVLEDGAKLRNVIIGANQREGVYCLGSCTLEFVWFEDVCEDAISIKGGGTANIIGGGAYKASDKIIQHNGCGHVNIINFYANDYGKVYRSCGNCKGNCRRSVHMEGTTAVNGGELMGINTNLGDKATYSNNCYPKVQCQGYNGCDKGNGACEPTKAGLC

SEQ ID NO: 20614 - protein, 457 aa, Fusarium oxysporum
MIQSAIFGAVAGLACIANVVAHKWLPVPRPEIKSWPYSPGGAFPVSPHRVKSCYVKASNNGGDDAGSILHAFHTCNNGGTVVLAANYTIASPLDLTFLKHVDVAITGTINFAPDLSYWTEHSFKYAYQDATAFWRFGGEDVNIFGLGVGLINGNGQPWYDAAATNTSLLRPVLFLVDGLQGGSVTGLRMINPPSWFNLIANSTDIIVDDLNLQAVSKNSNLAKNTDGWDIYRSDSVVLQNSIINNGDDCVSLKPNSTNIVVQGLHCNGSHGISVGSLGQYAEEFDIVENVYIYNISMSNASDGARIKVWPGQYTTFQDNLNGGGGSGYVKNVTYDGLFNTNNDWAIELTQCYGQNNLTLCNEFPSNMVISDIVFKNMWGTTSKRYDPKVGTLVCSDASKCSNIQAQNISVSPPSGKIATWFAVLSNSLSFDDLRCWLHRWKDRPLYSADTTPDSRLV

SEQ ID NO: 20615 - protein, 234 aa, Fusarium oxysporum
MLNTAFLASLFLIPLAIGAPAVDIEERQAPCQNVHIFLARGTDEPYPGRQSSLASAICSGLPSCGYENINYPANFNTYCTSIYAGITGGLSQITAYANRCPNSKIVLSGYSQGAQLIGDILGGGGGQSLGCTQQSNSALNPATSPGNKIAAALFFGDPRHAANQAYNTGTGASRNGINPRNGAQLTSLNRFSNKIRSWCLAGDNVCAQGTDPNAHTSYFNVFSQEAGAWVKTKV

SEQ ID NO: 20616 - protein, 457 aa, Fusarium oxysporum
MLFNNVISAVAVSALVSSVVGTSSRNSALPKRPHVEAAPYGTGKAFPASPARSRKDFCYVNPGKGKNVDDAPSILKAFKKCNKGGTIVLDQKYSIASPLDLTWLAHVDVIITGEVNFKSDPYYWADHSFKYDFQNMSSFWKIGGKDIHIYGDLTKGESLLDGHGQAYWEEMAVNKTLLRPILLTIEDAHGLTMSNLRMRNPPNWFNIIINSTDVLISDLDLEAKSLNGVKIANSDGWDTYRSDRIVIQNSVIDNTDAADCVSFKPNSTNVVVQNLVCNGSHGISVGSLGQYKGETDIVENLYIYNISMSNASDGARIKVWPGVETAFQSLLNGGGGLGRVRNVTYDTFYHENNDNAITITQCYGQKNQTLCNEFPANLTIEDVTMKNFWGTVSTKYDPRAGSLVCSAPDRCSNIVAEDIKVQVPSKKPPVYDCQNIDTSTLDITCRDPTSARDTTNG

SEQ ID NO: 20617 - protein, 397 aa, Fusarium oxysporum
MRFSSAAGLMALATSTVAHPNSATSDLDGSVWKALTPLKSRSWTSIPRNRPTKRQSGWNPPSNLATPLKEVWDHEVKTYSDALGFKNYGWDQVIAGKGQLNVCVRWESSASVTAEQRTKVAAALQDSYSAWMKWVSGYDNFPYEEVKINVVGWAVKNKSLLQGSTEGLDIYTDTDAEGIPQCSEKCGRFFHQDGDYSSCPGGAERHYDNSLWLTDGMQGGAGGDWGQRIGREYFMDLLGQKDIHILEHEIGHTFALDDFYDWTPTGQTNFIMLAGSSTKVTDFDGWMLRNWWYELSRKRGWQSTASSSASKGTSSEKAVTPVSSKAASTKTAVAKPTTTTVKQAATQTAAKPAKDTASSATAAAYAQCGGGAGYTGPTKCASGLKCTKHSEWYSQCL

SEQ ID NO: 20618 - protein, 477 aa, Fusarium oxysporum
MPTNGSQIKTYAAPEGVAVADAFLIYARSVDSEPWIPVSTYAVDVAEVNTTRNEFDKHPISVASFDMDGPVEVQVKYTLNKVQSAAIRPKSLGIEAVIDGDNTITFSMDRPRDVMLEINYDKWQALHILTNGIDHNAPPSDSQEIWYFGPGINNGSSYGLVTDGNLFVPSNTMVYLAGGAFVTFKLNFIKVCNSGVRGHGFIYNGPNGGAILIERSENIVVENVTSLGATGFSLTTGEAKGVSISGYRSFSSHGNGDGVDLFCSSNILVENCFLRNSDDTIAIYGHRWDYYGDSSNIVIRNCTLLPDIAHPIHMGTHGNPAKPETISGIHISNIDILDHYENQMWYQGCISLSAGDENLIEDVHIQDVRVERISKGQLVNMRVMKNEMWTTAPGHGIRNATLKNISLDATNSQIVNPSQILGFDYTRKVENIVFENLNIGGQYIHDGMEKPRWYMVADLVPIFVNEHVTNVKFILTK

SEQ ID NO: 20619 - protein, 263 aa, Fusarium oxysporum
MHFLSILLLAGSALAAPRAAQSSPHQPRGDSIDDMLPPIVPINTRSGDRDLISKIITAPTQAERVKLLNQPGDYVFDFKAGTGAGEASGKGGKSVSATALTMPALIGNGASMTVAFLGPCGMNTAHVHNRATELNIIVKGRLVTNFVVENGAKPIANTMDTFQMSVFPQGAIHQEFNPDCEDAVFVAAFDNADPGVNQIAQNFFSLNGDVVKATLGGVQTIDGKDIESFRAHIPANIALGIDACLNKCGIKRNSKRDISELLN

SEQ ID NO: 20620 - protein, 262 aa, Fusarium oxysporum
MKPTQALIALAAIVYAAPVVEQTKALAPPLAELDTHFEHHIKRCGKDEPTFLGRFPFANETYNQLTDGTPCRNVTMIYARGSRQAGNVGKANNTGPALFNSLADRIGLENLAVQGVTYKARRRDYIFKGGCNEGSKTMARLINQAASQCPDTKIVIAGYSQGAQLLHKAAKNVTAGVTQHIAAAVTLGYPEKPMGKIAASRSLSVCRPGDSFCDKTIPWKPFVPFVGAPLWWFLTMLDTHGDYNENATAVANWIADRVTNIG

SEQ ID NO: 20621 - protein, 231 aa, Fusarium oxysporum
MRAAFILSFLLASATALPTASIEKRAVAAQDVNLLETRDLLNRNDLENGDSSNCPTAILVYARGSTEPGNLGITVGPILVEAMQLAIPDIWIQGVGGPYTADLAPNFLPEGTTDASIDEAKRLFQMAYDKCPDTPVVTAGYSQGTVVVGYALSELDGAVQNQVVGAALFGYTKNEQLGGRIPNYPTDRTKVFCLPTDLVCDGTLFILPAHFLYGADAAVPGPEFLVGQIQK

SEQ ID NO: 20622 - protein, 233 aa, Fusarium oxysporum
MHASSLLTLLTTLPAAMACLGYTGGVPKATGTKSLSAPQYLKKGQVFDAKWVRYDRGVKCSGQSEGGEKDAVFVLEDGATLRNVVIGANQKEGVHCLGACNLEFVWFEDVCEDAISIKGSGTANIIGGGAYKAADKIIQHNGCGHVNIVNFYANDYGKVYRSCGNCKGNSKCKRSVHMEGVTAVNGGELIGINTNLGDKATYSNNCYPKTQCQGYNGCDKSNGECEPSKAGKC

SEQ ID NO: 20623 - protein, 297 aa, Fusarium oxysporum
MLGLPSPRKLLAQLSLGASLVAAQLQTITNFGNTYGTQLTMQVYIPGNLPASPAVMLALHACGGNGPGYFQQTKYKSLADSRGVILIFPSSQKDFNCWDVASAKTLKHDGQGDSQVLVSMVDYVIKTYKADPKKVYVTGTSSGCMMTNVLAATYPDRFAAATCYSGVAAGCMAGSPGSSPISSDRVCSDGKIIKTGQQWADQVKSMYPGYSGSYPRFKTWHGTADNLVFYRNLLEQIKEWSTIQGVSFTRNETSTPQSGYTTMIYGDGTKFVAVSAAGVGHVVPTHEDLDFKWFGLT

SEQ ID NO: 20624 - protein, 467 aa, Fusarium oxysporum
MKLVLITGLFSAILATAQLTGPVGPLTALSQKTHECNILDYGAVNDNSTDIADAIEKTFKTCVLPHAGSRLIVPDGQYLIKRSVVLSNGTNWAFQLDGLITLAYGGNWTVDRDGQFLQNGLTIINPVDFEFYSQNGKGAIQGQGYIYRNLANTFRPRLVRIISPINTSVHDLILVDSPKFHIVFDFAENLEVYHLTIRGANLGSYDGVDVVGTNYWIHDIEVTNRDECVSVKSPSNHALIENLVCNQAGSGISIGSLNVSASIANIHARNINIIQGNNIAFIKTYPGGSGHVTNITFENFRSKASLYGLDINQYWQNTFEPDTGAVALSNLVFKNFSGSVADGSKRPPLFLVANDLSFATNVTVEDFSIWTESGSSVVNKISNIFGHGDNSYGQANGIKSLSSGQAPTAYTSTYTVTATPTGWAAPSFPTWAAASTGYGTDVPIPVYTPAALWKPEGDYDKHYWGSF

SEQ ID NO: 20625 - protein, 367 aa, Fusarium oxysporum
MQYRVIMAATLAIGAYAAPAPLITGAPSLSRRQDSESGSGGSGGSSVLDAPMTIAAGESFDGGNAIFDRGVSCTGQVEGGDSDAVFILEKGATLSNVRIGPNQIEGVHCNGGCTLNNVVWDAVCEDAFSIKKQEDGETTTINGGGATGAEDKVIQHNGGGTVIIKDFEVSDFGKLYRSCGNCKEMPARHVEISGGSASNGKILVGINPNMGDTAKISGIQLTNVPKECITFEGVTDGSEPKEVGTCDSNAGSGSGSGSGDSTEAPATPTTPADGSETPAASEVADPVETSADGSQGDDQSGDDQSGDNDDGDNDESDDDKKDDDSDDENKDEQSDNENQDQESESDNQQAQPSQPNFSFGSGGFGGF

SEQ ID NO: 20626 - protein, 374 aa, Fusarium oxysporum
MKLTAFTSLWLLTLCYTALAAEVVPRSTFTEVTDYGDNPTGTRMWLYVPKTLAPKPAVVVGIHWCTGSAQAYYQGTRWAFYAETYGYIVIYPQTPYTQDKCWDVASKMTLTHDGGGASNSIANMAKFVIKEYSADSSRVFVTGTSSGAMMTNVMAAAYPDIFAAGIAYAGVPAGCFRSEDDIPDYWNSTCATGQSIYTQGQWANVVKNMYPGYNGPRPKMQIYHGSVDEVLNVQNYYETIKQWTGVFGYSAEPKSTTANVPRSPYTRFVFGDKLQTFLGQGITHSIDVFPEEDLKWFGFTLTNSQDPVTPSPTITATVPTNTGGSEGSPQWGQCGGMGWTGPKQKLQCATPYNCVKINDLPIIVPGTELCVRQY

SEQ ID NO: 20627 - protein, 100 aa, Fusarium oxysporum
MQFYTIVSLFLASTAYALPATSANGYEACPSGGLFGNPQCCSLNLVGVLSGDCRAPTKTPNSAKEFQAICAESGQKARCCGLSEILELGAFCQKPVGVSA

SEQ ID NO: 20628 - protein, 376 aa, Fusarium oxysporum
MRSYTLLALAGPLAVSAASGSGHSTRYWDCCKPSCSWSGKAAVNAPALTCDKNDNPISNTNAVNGCEGGGSAYACTNYSPWAVNDELAYGFAATKISGGSEASWCCACYALTFTSGPVKGKKMIVQSTNTGGDLGDNHFDLMMPGGGVGIFDGCTSEFGKALGGAQYGGISSRSECDSFPELLKDGCHWRFDWFENADNPDFTFEQVQCPKALLDISGCKRDDDSSFPAYKGDTSASKPQPSSSAKKTTSAAAAAQPQKTKDSAPVVQKSSTKAAAQPEPTKPAEKPSAAKPAATKPAATKPAQPVNKPKTTQKVRGTKTRGSCPAKTDPTAKASVVPAYYQCGGSKSAYPNGNLACATGSKCVKQNEYYSQCIPN

SEQ ID NO: 20629 - protein, 548 aa, Fusarium oxysporum
MRLQSIAAILAAAATASAQSVSGKAYGFAAGVTGGEGEAVTPSSAEELATLLADDTPRVIYLDKEFDFTGDVKTGAGCDRKSCSASNGGQLYLGDLSCGGDDNVAVSSITYDAAGPEPLPVGSNKSIIGNGKAVLKGKGLSIKKGSKNVIVQGIEFTNINPGVVWGGDALELKGLNDGVWIDHCKFSKVGRMFIVSHYDGSRLTISNSEFDGVTDTSASCNGNHYWTMMFYGEGDQVTLDRNHFHDVAGRAPKLGEPGTNGYFHATNNYFQNMKGHAFDAYQGANAIIEGNVFDGVDTPITKEAASVNTLFVADESDASACQSALGRACVPNSATSSGDIPSLKGESGLDAVAKNKDNIITPVSASEVTALVLGSVGPANVGSGSNSGSGSDSAPSQSPESGNDATETTPATPETTPESTPETAPETTPEAVNEQEALPDYPEETEAEPVANAEVKPVASDDCEEETDATPSKTEEKPVATGDCDDEIEAAADSSSSTGSSTAQMYGQCGGKNWTGATTCPSGSSCKKMNDYYSQCIGSNSRVRRYVQ

SEQ ID NO: 20630 - protein, 336 aa, Fusarium oxysporum
MKASMFLLGASAILASASPIRNALEKREIEKREMKTEWVYEVVTVTVVAGDEPETTAPAATKPTGVVFMEAPAPKYTAPSTTKEAAKPKKVKKPVSKPSTTKEAPKVTVVTVEPQPESTKETVYESPAPVVEKPKTTVEKVVAKPTKAAEPKVEVPASGGDDLSLDGAYNTVMLAYHNIHRLNHSASALEWDDELAGYAENTANGCVFEHDMKQGNGGYGQNLASWGATSDIDGLKNKAAAGGITNQWYNNEMANWAFYGQENPPADMNIDLYGHFTQVVWKDSTKVGCATVKCPAGTVLSFPSWYTVCNYNPQGNFGGRYGDNVLKPKGEKRVTV

SEQ ID NO: 20631 - protein, 360 aa, Fusarium oxysporum
MFSKSVLIALVPFAVAGPIAPRQGLGSGLGSGIPSFGGSTGGLPGLPSSGGSTGGLPSIPSLPSSGGSTGGLPSIPGLGSGGSSGGIPSIPGLPSSGGSTGGLPSLPIGGGGSSFLPGGSTGGDTTGDTTGDTSGSASTSAPASQPTGSSETPRAEGGSSTSPFGSFLGSAGGSSGGFGGSTQNGLSGDCKDVTVIFARGTTEMGNVGTAAGPPFFQALAQQLGSDKLAVQGVEYAASVGGIMQMGDQAGSQKMVSLVKEAYQKCPKTKVVMSGYSQGAMLVHNAAKSLPADTTSKIAAVVNFGDPFQRQAIQGVPADRVKIICHAGDGVCAGTAAITPDHLTYSQDANAAAQFVVSKVK

SEQ ID NO: 20632 - protein, 565 aa, Fusarium oxysporum
MKSKSIMAASTVMELALAQASAEPLCSTIINLQPIEYQFQQPVLIDSYFPANTDIVLDDGHVVHVTNAPTSLSTVLTDVSTSSTTLTSSASNVNGNPPDGGYLTFTVPANPDDIGNHPVTKTYPPTEPGQPGIVVIQVPTSPPGADGIPTSSVPYVTVTTTGDFPSLTGPVTTTITPDEPGATGSVIIEVPNTKIASPSASYVTVTTPGSLAPTDAPHTSTIPPSNPTDPGTVIVVVPSSQASSVSSIPFVTVTTTGSTLNPTDDPITSTISPSGSTGSGTVIVEVPPSSFPSGSGASSSPVSFVTRTVTGDDGNGEPSTTTITPTASSGPGTVIVEVPPPTNSPSATSSGSSMPGGPGSSGTGSSASQGPSDSAAPSSSTGDTGPSSVPESSSPSRATTDDAASSTSASAPASSSAASSTTQSETPSSAGAETSTPATSPASSSAPSTSDADTSSPVNPTTSSPASSAATSAPGSSTESAPSSSTSAAAANFDPCPDSLYGNPQCCSVDVLGVADVECDSPTESPTDAENFQAICAASGQRARCCVLPVLGQALVCLTPVGVSN

SEQ ID NO: 20633 - protein, 147 aa, Fusarium oxysporum
MHLGASLIALASAAGLVSAGINCNGAAGCPSVAGNLDQLINLANGIDDNRWYNSGQKIVCIQTNLGNTGLCAFQQNTGGAPGHSIKSLLRSLRDHGCKKCGSVPLFYPSDNNDSSHGILTVNVVGNTGGCAWGRMQVVNKVRLTRFK

SEQ ID NO: 20634 - protein, 467 aa, Fusarium oxysporum
MAYKLILAAFAATALAAPVEERQSCSNGVWAQCGGQNWSGTPCCTSGNKCVKLNDFYSQCQPGTAEPSSTAAGPSSTTATKTTATGGSSTTAGGSVTSAPPAASGNPYSGVDLWANSYYRSEVMNLAVPKLSGAKATAAAKVADVPSFQWMDTYDHISLMEDTLADIRKANKAGGNYAGQFVVYDLPNRDCAAAASNGEYSLDKDGANKYKAYIAKIKGILQDYSDTKVILVIANSIAEPDSLANLVTNLNVDKCAKAESAYKELTVYAIKELNLPNVSMYLDAGHGGWLGWPANIGPAAKLYAQIYKDAGKPSRVRGLVTNVANYNGWKLSTKPDYTESNPNYDEQRYINAFAPLLAQEGWSNVKFIVDQGRSGKQPTGQKAQGDWCNAKGTGFGLRPSTNTGDALADAFVWVKPGGESDGTSDTSAARYDYHCGLDDALKPAPEAGTWFQAYFEQLLDNANPSFL

SEQ ID NO: 20635 - protein, 230 aa, Fusarium oxysporum
MKFSIISTLLAATASALPAGQDAAALEARQLGGSITRNDLANGNSGSCPGVIFIYARGSTESGNLGTLGPRVASKLEAKYGKNGVWIQGVGGAYRATLGDNALPRGTSSAAIREMLGHFSDANQKCPDAVLIAGGYSQGAALAAASVTDVDAGIREKIAGVVLFGYTKNLQNRGKIPSYPEDRTKVFCNTGDLVCTGSLIVAAPHLAYQSAASGAAPEFLIQKADAAGAA

SEQ ID NO: 20636 - protein, 215 aa, Fusarium oxysporum
SSQLTISGLILDNRLGDKPNAKSGSLPAAHNSDGFDISSSDHVTLDNIHVYNQDDCVAVTSGTNIIVSNMYCSGGHGLSIGSVGGKSNNVVNGVQFLDSQIVNSENGCRIKSNSGTTGTIANVTYQNISLTNISKYGVDVQQDYLNGGPTGKPTNGVKISGIKFIKVTGTVASSAQDWYILCGDGSCSGFTFSGNAITGGGKTSSCNYPTNTCPS

SEQ ID NO: 20637 - protein, 298 aa, Fusarium oxysporum
MKIATSLAAVVALLQSTSAHYIFQQLSVGSTKYPVFQYIRQNSNYNSPVTDLDSNDLRCNVGTSGTNTQTVGVKAGDSITFTLDTAVYHQGPISVYMSKAPSSASSYDGSGGWFKIKDWGPTFSGSTSTWPMYLSYTFNLPTCITNGAYLLRIQSLGIHNPWPAGIPQFYISCAQISVSGGGSTVPSNQVKIPGAFKETDPGYTANIYSNFNSYTIPGPAVFSCNGAGGGDGGGNGPTTTLQTSTRASSTQVPPVSTQPSGQCASLWGQCGGSTWTGPKCCATGTCKALNDFYSQCTT

SEQ ID NO: 20638 - protein, 254 aa, Fusarium oxysporum
MKFSIVFAGLFASATMASPQGNITPNTMGALERRASFPIPASKGSVTYKKVQTISGVFDGGMKTYGRGVKCTGQAEGGDADAVFLLKNGATLKNVIIGADQIEGVHCEGSCTIENVWWKKVCEDALSLKGDGNALIKGGGATGAADKVIQHNGLGTVTIDGFTVVDFGKLYRSCGNCKKMGTRNVVVKNVKAFNGKVLTGINSNKGDVSTITGTCASSVKEICVEYEGTVPGKEPKKLGSGPSKACKYSSVKSC

SEQ ID NO: 20639 - protein, 371 aa, Fusarium oxysporum
MPSLKTSSLLAFAASAARVAAHGHVDWLVTNGVAFRGYSAPEMSWNPNHPPVVGWTNGATDNGYVEPNSFADPDIICHRAARPGKGHVTVAAGDKITLQWNTWPESHKGPVIDYLARCPGDCETVDKNDLEFFKIGQEGLIDMSMHSGKWAADVLVAAGFSWTLQIPEALAPGNYVLRHEIIALHGSGQPNGAQNYPQCFNLKVTGDGDLAPDGVKGTQLYKANDPGILFNLYTTPLSYKIPGPTLVPGLPPTVSQRVVAATATSSATVPGQTQASTSSKSPSSTSKGSSTSTSTAVGDTTLKTSTTSRSSSSSTTKDTPQPTEDDDIICGPATGGLPKYSQCGGKDYTGPTVCQWGSSCKVLNPYYSQCL

SEQ ID NO: 20640 - protein, 616 aa, Fusarium oxysporum
MAAVRICVCGDESTGKSSLIASLVKDQFVNNKIQPVLPQITIPPSIGTPENVSTTIVDTSARPQDRTTLRKEIRKCNVILLVYADHYSYERVALFWMPYFRSLGVNVPVVLCANKSDLAGQGTTPQVVEEELLPVMAEFREIDSCIRTSARDHRNVNEVFFLCQKAVTHPIAPLFDYKEGHLKPLCVDALRRIFYLCDKDQDGYLNEQEMRDFQARCFDKPLTADDLDNIKLSISKSLPTSDLEKGIDLPGFLQLNKLYAEKGRHETIWIILRKYHYTDSLSLEDKFIRPKFDVPEYSSAELSPAGYRFFVDLFLLFDKDNDGGLNDQELEALFAPAPGLPSSWTDSSFPSSTGWLAQWSMTTFIEPKTTIEYLAYLGFEPPNPKEPITAALKITKPRKRRRRPGRVERNVVLCYVLGASGAGKSALLDSFLNRPFDGLYHPTIKPRRAVNSVELPGGKQVYLILEELGELEPAILDNPAKLDACDLICYAYDSSDPDSFSHIVDLRNKYTHLDELPSIYTALKADKDKTNQRCELQPDQYTASLNMSLPLHVSVTWGSISELFVAFADAATNPSTAFPRSNEEGPDRTSLYIALGATACAGVAALTIWRRATNAL

SEQ ID NO: 20641 - protein, 378 aa, Fusarium oxysporum
MTKLGFALLAALAGSAIAVPAPAVTQAPDVHAYAKRATSCTFSGSDGASKASKSQAACATIVLNNVAVPSGETLDLSKLKDNTKVIFKGTTTWGYKEWKGPLMKISGNKITVEGSGAVLNAGGERWWDGNGGNSGKDKPKFFAAHKLTDSKINNLYVKNTPVQAVSINGVNGLTINQFTLDNKDGDTKGGHNTDAFDIGSSTGVTITGAKVYNQDDCVAVNSGKNIIFQNGYCHGGHGLSIGSVGGRDDNIVDNVQFLNSEVTNSANGIRVKTMKNTTGKVNKVTYSDITLSKITKYGILIEQNYDGGDLHGEPTSGLPITGLTLKNIKGKNGVSSSGKNAAIVCGSSGCKDWTWQNVQVTGGRKYDSCENVPSVASC

SEQ ID NO: 20642 - protein, 384 aa, Fusarium oxysporum
MRSYTLLALAGPLAVSAASGSGHSTRYWDCCKPSCSWSGKAAVNAPALTCDNKDNPISNTNAVSGCEGGGSAYACTNYSPWAVNDDLAYGFAATKISGGSESSWCCACYAMTFTSGPVKGKTMIVQSTNTGGDLGDNHFDLMMPGGGVGIFDGCTSQFGNALGGAQYGGISSRSECDSFPELLKDGCHWRFDWFKNTDNPDFTFEQVQCPKALLDISGCKRDDDSSFPAFKGDTSASKPQPSSPAKKTTSVAAAAQPQKTKDSVPAVQEPSTKDAEKPEPTKPAEKPSAIEVEKPQADKPAATKPTATKPAQPDDKPKTTQKVRGTKTRGSCPANTDTTAKASVVPVYYQCGGSKSAYPNGNLPCASGSKCVKQNEYYSQCVPN

SEQ ID NO: 20643 - protein, 484 aa, Fusarium oxysporum
MFKIFLKTVAAANLIGLAAADPIPIVPDRVRLGPRASACTPQAGRSSSVDDVPAIQAAIKACPSGTIVIPSDQTYHINSQLSFAGCSGCTFELNGELLASTDFGYWNGRGEIIYLQNIRGATITGSGTINGNGQASWDYIITNTSYKRPYLIRVDGSTNIKMSEITIKNAPSFHVVTSGNSKDVVYSGLTLYSVSSSSNIAHNTDGFDIGPASYVTVENTKITNDDDCVVLKPGASYVTTTGVTCVGSHGLSIGSLSGGAGSNDIVTNSIFKDCTMIGSTKAAGIKYYPGGSTHGTGSISNVTWQDITCDTCDYAIQISTCYMSTPAACSANPSTGKISGVVFSGFSGTTSGHYKDVVANMDCSVGGTCGIKIEDFTVTAPSGESEVLCAHTPNNLGVFPNSTRPSPVMSRNPEQKTRPVANVVSLMISMIIVGDDLMVVSDPASEAVEKRLAVGSGEQAHISPGMTSVGNRRSIMGSWTGPPI

SEQ ID NO: 20644 - protein, 98 aa, Fusarium oxysporum
MQFSLAIVTLLATAVSALPTEEKRQAYIPCSGLYGTSQCCATDVLGVADLDCGNPPSTPANATDFSAVCSAIGQRARCCVLPILDQGILCNTPTGVQD

SEQ ID NO: 20645 - protein, 381 aa, Fusarium oxysporum
MRFSPLLFGSFIASAFAGHSHSSSKSHHPRSLPESDSSSDSHPAPGGCNFTTADTAMKHKSSCSTIVLNNVKVPAGKTLDLTKLKDGTTVIFKGVMTFGYAEWLGPLITISGNGLTIKGDAGHCINGQGRRYWDGKGSNGGKKKPKLLALHNVHDSIVQNLNIKDTPVQAVSINTVTNLLVKDVHIDSSLGDKLGGHNTDGFNVGKVDGLVIDGAVVGNQDDCVAINSGKNITFTNGHCSGGHGASIGSVGNKSSNIVENVLISKTMIENSENAIRIKTIAGATGSVTDVTYEDITLRDIDKYGMVFRQDYLNGGPTQQPTKGIPMTGIRIKNVTGTVKPAGKNIFILCANCKDWTFTNIDISGGQSKEKCVGVPAGAFCT

SEQ ID NO: 20646 - protein, 306 aa, Fusarium oxysporum
MKASLLLSLLPVAQAAVIDTRQSKTGDGKQGDTDATQGDLSQRPPPRFPFPITKFPVAKETVVLKNAKYIMPGEVFDGKMKRYERPEGSCNEQAEGTDADAVFNLLPGSTIRNVIIGKNQAEGIHALGDAWVENVWWEDVCEDALTSKGLNTQLRVIGGGARSATDKIFQDNSLGGKYNITGFYAEGFGTFYQSCGNCLNQAKRNATIQNVIAVDGLRMGIINPNYGDEFRLKNAQIDNVTSIVDKEIGNNVQTVPYYIGNGPDEKYALYNETRDNITKFKGKVTNAYEPEDPYEWLEEFWPEGFN

SEQ ID NO: 20647 - protein, 345 aa, Fusarium oxysporum
MHSSTTLLLLATATVNAIGIRDDCKDVHIFLAKGNNEPYPGRQGKLAGAICSGLKSCDYEDIQFQNALEDPFCDSVTEGVKNGIKQITAYNKKCPDSKLVVSGYSQGGQVVGDILGGGGGVFFQNCVEPDLQGLNPKTLPGSKIVAAMVFGDTRHTKDQPFNVLSGAGKNGLFPRPAGMLQNLASYGDVFRNYCVETDPICAQGDEVETHLNYFDVFTDDVAEWVKERVGEDSTTTTAATKTSTKAKSTAKETSTKDAETESTTEATSTTKDASKDSTTKDTTTAAASTTADSSSTTNASSAEGRATAGEASSDAAAPLSTDNAATSKGASLMGMIIGVAALLAI

SEQ ID NO: 20648 - protein, 334 aa, Fusarium oxysporum
MRKAALLTIANFGSAFAALQFYNQCGGGAYTGDTTCPSGSTCVEASKWYSQCIPDAKAGPSPKAAAVEKSDVDLPSFGFPEFPEAPGSGSGNQNGGENDENASLPPIVSAPAEEADESSKKPVETPIDSPVANPTEAPVANPDAGSGSGSGAGGITRTIPASSGASAAATAIPVSGEFDGKMTYYDRSPAVCQDQVETGEADAMFILEDGATLRNVIIGPGQAEGVHCKGTCTLENVWFEDVCEDAITLKQKSGTSTIRGGGAFHAADKVVQFNGRGTVEISDFYVEDYGKLVRSCGNCKDNGGPRNVVIDNVAAVNGGVLCGSKSHRRHQSSL

SEQ ID NO: 20649 - protein, 632 aa, Fusarium oxysporum
MRFSDSLLLIGLSSLAGAHPSRRAPNPSPLSKRGLDLEAFKLPPMAEYVPQDEVPDDVSAKVVTKRADYTETAKDLVKSTFPKATFRMVTDHYVGSNGIAHVNFKQTVNGIDIDNADFNVNIGADGEVFSYGNSFYEGKIPGPLTKRDEKDPVDALKDTVDVLSLPVEAEKAKAEKKSKNHYTFTGTKGTVSKPEAKLTYLVDENKELKLTWRVETDIVDNWLLTYVNAAKTDEVVGVVDYVNEATYKVYPWGVNDPSKGSRSTVENPWNLEASEFTWLSDGSNNYTTTRGNNGIAQVNPSGGSTYLNNYRPDSPSLKFEYDYSTSTTTPTTYRDASIAQLFYTANKYHDLLYLLGFTEQAGNFQTNNNGQGGVGNDMVILNAQDGSGTNNANFATPADGQPGRMRMYLWTYSTPQRDCSFDAGVVIHEYTHGLSNRLTGGPANSGCLPGGEPGGMGEGWGDFMATAIHIQSKDTRASNKVMGDWVYNNAAGIRAYPYSTSLTTNPYTYKSVNSLSGVHAIGTYWATVLYEVMWNLIDKHGKNDADEPKFNNGVPTDGKYLAMKLVVDGMSLQPCNPNMVQARDAIIDADTALTKGANKCEIWKGFAKRGLGTGAKYSASSRTESFALPSGC

SEQ ID NO: 20650 - protein, 240 aa, Fusarium oxysporum
MKYTAILALAGVSSAAVTKTLPKSAGATSFPTAVPVKGSYDGGMKRFERSPSVCQGQTETGEKDAMFILENGATLSNVIIGASQAEGVHCKGTCTLNNVWWADVCEDAVTLKQTSGTSYINGGGAFHASDKIVQFNGRGTVQIKDFYAEDYGKLVRSCGNCKDNGGPRNVVISGSVAVDGGVLCGINTNYGDACKITSSCQNKGKYCDRYEGNSSGAEPSKIGSGPDGKYCTTSGVTTSC

SEQ ID NO: 20651 - protein, 240 aa, Fusarium oxysporum
MKYTAILALAGVSSAAVTKTLPKSAGATSFPTAVPVKGSYDGGMKRFERSPSVCQGQTETGEKDAMFILENGATLSNVIIGASQAEGVHCKGTCTLNNVWWADVCEDAITLKQTSGTSYINGGGAFHASDKIVQFNGRGTVQIKDFYAEDYGKLVRSCGNCKDNGGPRNVVISGSVAVDGGVLCGINTNYGDACKITSSCQDKGKYCDRYEGNSSGAEPSKIGSGPDGKYCTTSGVTTSC

SEQ ID NO: 20652 - protein, 404 aa, Fusarium oxysporum
MVRNIAIAALLPAAFASTLPRDPCSVTDYSGLATAVSSCTNIVLNGFQVPTGKALDLSKLKDGATVTFKGKTTFATTADNDFDPIVISGNGITITGASGHVIDGNGPAYWDGEGSNNKKNPKPDHFIVVKKTTGNSKITNLNIQNWPVHCFDITGSSQLTISGLILDNRLGDKPNAKSGSLPAAHNSDGFDIPSSDHVTLDNIHVYNQDDCVAVTSGTNIIVSNMYCSGGHGLSIGSVGGKSNNVVNGVQFLDSQIVNSENGCRIKSNSGTTGTIENATYQNIALTNISKYGVDVQQDYLNGGPTGKPTNGVKISGIKFIKVTGTVASSAQDWYILCGDGSCSGFTFSGNAITGGGKTSSCNYPTNTCPSKVKAGRSPLHVHKARTQSKSGLTVVAWNCCGGQL

SEQ ID NO: 20653 - protein, 455 aa, Fusarium oxysporum; identical to SEQ ID NO: 20559

SEQ ID NO: 20654 - protein, 370 aa, Fusarium oxysporum
MVRNIAIAALLPAAFASTLPRDPCSVTDYSGLATAVSSCTNIVLNGFQVPTGKALDLSKLKDGATVTFKGKTTFATTADNDFDPIVISGNGITITGATGHVIDGNGPAYWDGEGSNNKDNPKPDHFIVVKKTTGNSKITNLNIQNWPVHCFDITGSSQLTISGLILDNRLGDKPNAKSGSLPAAHNSDGFDISSSDHVTLDNIHVYNQDDCVAVTSGTNIIVSNMYCSGGHGLSIGSVGGKSNNVVNGVQFLDSQIVNSENGCRIKSNSGTTGTIANVTYQNISLTNISKYGVDVQQDYLNGGPTGKPTNGVKISGIKFIKVTGTVASSAQDWYILCGDGSCSGFTFSGNAITGGGKTSSCNYPTNTCPS

SEQ ID NO: 20655 - protein, 371 aa, Fusarium oxysporum; identical to SEQ ID NO: 20583

SEQ ID NO: 20656 - protein, 455 aa, Fusarium oxysporum; identical to SEQ ID NO: 20570

SEQ ID NO: 20657 - protein, 371 aa, Fusarium oxysporum; identical to SEQ ID NO: 20556

SEQ ID NO: 20658 - protein, 371 aa, Fusarium oxysporum; identical to SEQ ID NO: 20583

SEQ ID NO: 20659 - protein, 374 aa, Gibberella circinata
MVRNIALAALLPAAWALPSSSLQERDACTVTDYSGLATAVSSCTNIVLKGFQVPTGKQLDLFKLKAGTTVTFKGTTTFATTADNDFNPIVISGSGITITGASGHVIDGNGQAYWDGQGSNNADNPKPDHFIVVKKVTGTSKITNLNIQNWPVHCFDITGSSDLTISGLILDNRAGDKPNSKSGGLPAAHNSDGFDISSCDHVTLDNNHVYNQDDCVAVTSGTNIVVSNMYCSGGHGLSIGSVGGKSTNVVNGVQFLNSQIVNSENGCRIKSNSGTTGTINNVTYQNIALTNISKYGVDVQQDYLNGGPTGKPTNGVKISNIKFTKVTGTVASSAQNWYILCGDGSCSGFTFSGNAITGGGKTSSCNYPTNTCPS

SEQ ID NO: 20660 - protein, 374 aa, Gibberella circinata
MVRNIALAALLPAAWALPSSSLQERDACTVTDYSGLATAVSSCTNIVLNGFQVPTGKQLDLSKLKAGTTVTFKGTTTFATTADNDFDPIVISGSGITITGASGHVIDGNGQAYWDGQGSNNADNPKPDHFIVVKKVTGTSKITNLNIQNWPVHCFDITGSSDLTISGLILDNRAGDKPNSKSGGLPAAHNSDGFDISSCDHVTLDNNHVYNQDDCVAVTSGTNIVVSNMYCSGGHGLSIGSVGGKSNNVVDGVQFLNSQIVNSENGCRIKSNSGTTGTINNVTYQNIALTNISKYGVDVQQDYLNGGPTGKPTNGVKISNIKFTKVTGTVASSAQNWYILCGDGSCSGFTFSGNAITGGGKTSSCNYPTNTCPS

SEQ ID NO: 20661 - protein, 371 aa, Fusarium oxysporum; identical to SEQ ID NO: 20556

SEQ ID NO: 20662 - protein, 455 aa, Fusarium oxysporum; identical to SEQ ID NO: 20559

SEQ ID NO: 20663 - protein, 455 aa, Fusarium oxysporum
MLFNNVISAVAVSALVSSVVGTSSRNSALPKRPHVEAAPYGTGKAFPASPARSRKDFCYVNPGKGKNVDDAPSILKAFKKCNKGGTIVLDQKYSIASPLDLTWLAHVDVIITGEVNFKSDPYYWADHSFKYDFQNMSSFWKIGGKDIHIYGDLTKGESLLDGHGQAYWEEMAVNKTLLRPILLTIEDAHGLTMSNLRMRNPPNWFNIIINSTDVLISDLDLEAKSLNGVKIANSDGWDTYRSDRIVIQNSVIDNTDDCVSFKPNSTNVVVQNLVCNGSHGISVGSLGQYKGETDIVENLYIYNISMSNASDGARIKVWPGVETAFQSLLNGGGGLGRVRNVTYDTFYHENNDNAITITQCYGQKNQTLCNEFPANLTIEDVTMKNFWGTVSTKYDPRAGSLVCSAPDRCSNIVAEDIKVQVPSKKPPVYDCQNIDTSTLDITCRDPTIARDTTNG

SEQ ID NO: 20664 - protein, 455 aa, Fusarium oxysporum; identical to SEQ ID NO: 20570

SEQ ID NO: 20665 - protein, 360 aa, Fusarium oxysporum; identical to SEQ ID NO: 20591

SEQ ID NO: 20666 - protein, 100 aa, Gibberella moniliformis
MQFYAIASLFLAGTAFAAPATSPNGYDACPDGGLIGTPQCCSLDLVGVLSGECSSPSKTPNSAKEFQEICAASGQKARCCFLSEVFTLGAFCQKPVGVTA

SEQ ID NO: 20667 - protein, 98 aa, Gibberella moniliformis
MQFSLALVTLLATAVSALPTEEKRQAYIPCSGLYGTSQCCATDVLGVADLDCGNPPSTPANATDFSAVCSAIGQRARCCVLPILDQGILCNTPTGVQD

SEQ ID NO: 20668 - protein, 374 aa, Gibberella moniliformis
MVRNIAIAALLPAAWALPSSSLQERDACTVTDYSGLATAVSSCTNIVLAGFQVPTGKQLDLSKLKAGTTVTFKGKTTFATTADNDFDPIVISGSGITITGASGHVIDGNGQAYWDGEGSNNKDNPKPDHFIVVKKTTGNSKITNLNIQNWPVHCFDINGSSQLTISGLILDNRAGDKPNAKSGSLPAAHNSDGFDISSSDHVTLDNNHVYNQDDCVAVTSGTNIVVSNMYCSGGHGLSIGSVGGKSDNVVDGVQFLNSQIVNSENGCRIKSNSGTTGTINNVTYQNIALTNISKYGVDVQQDYLNGGPTGKPTNGVKISNIKFTKVTGTVASSAQNWYILCGDGSCSGFTFSGNAITGGGKTSSCNYPSNTCPS

SEQ ID NO: 20669 - protein, 371 aa, Fusarium oxysporum; identical to SEQ ID NO: 20556

SEQ ID NO: 20670 - protein, 370 aa, Fusarium oxysporum; identical to SEQ ID NO: 20654

SEQ ID NO: 20671 - protein, 360 aa, Fusarium oxysporum; identical to SEQ ID NO: 20591

SEQ ID NO: 20672 - protein, 360 aa, Fusarium oxysporum
MFSSTVLLSGLVASVLAAPALEPRAGSCTFTDAATAIKNKAGCSTITLNNIAVPAKTTLDLTKLNDGTHVIFQGKTTFGYAEWEGPLISFTGNNLLIEGAAGHSIDCEGKRWWDGKGSNGGKKKPKFFSAHSLKNSNIKNLNVFNTPVQAFSINSVTNLGVYGVHMDNSLGDSLGGHNTDAFDVGSSTGVYISGAVVKNQDDCLAINSGTNITFTGGNCSGGHGLSIGSVGGRSDNTVKTVRILNSSISNSDNGVRIKTVSGATGSVSDVKYDTITLSNIAKYGIVIEQDYENGSPTGTPTAGVPITDVTINKVTGTVKSSGTDVYILCANCKNWTWTNNKVTGGKTSTKCKGIPSGASC

SEQ ID NO: 20673 - protein, 349 aa, Gibberella fujikuroi
DPCSVTEYSGLATAVSSCTNIVLAGFQVPTGKQLDLSKLKAGTTVTFKGTTTFATTADNDFNPIVISGSGITITGASGHVIDGNGQAYWDGKGSNSNSNQKPDHFIVVQKTTGNSKITNLNIQNWPVHCFDITGSSQLTISGLILDNRAGDKPNAKSGSLPAAHNTDGFDISSSDHVTLDNNHVYNQDDCVAVTSGTNIVVSNMYCSGGHGLSIGSVGGKSDNVVDGVQFLSSQIVNSENGCRIKSNSGATGTINNVTYQNIALTNISTYGVDVQQDYLNGGPTGKPTNGVKISNIKFIKVTGTVASSAQDWFILCGDGSCSGFTFSGNAITGGGKTSSCNYPTNTCPS

SEQ ID NO: 20674 - protein, 374 aa, Gibberella fujikuroi
MVRNIAIAALLPAAWALPSSSLQERDACTVTDYSGLATAVSSCTNIVLAGFQVPTGKQLDLSKLKAGTTVTFKGKTTFATTADNDFDPIVISGSGITITGASGHVIDGNGQAYWDGQGSNNQDNPKPDHFIVVKKTTGNSKITNLNIQNWPVHCFDITGSSDLTISGLILDNRAGDKPNAKSGGLPAAHNSDGFDISSSDHVTLDNNYVYNQDDCVAVTSGTNIIVSNMYCSGGHGLSIGSVGGKSNNVVDGVQFLNSQIVNSENGCRIKSNSGTTGTINNVTYQNIALTNISKYGVDVQQDYLNGGPTGKPTNGVKISNIKFTKVTGTVASSAQNWYILCGDGSCSGFTFSGNAITGGGKTSSCNYPTNTCPS

SEQ ID NO: 20675 - protein, 374 aa, Gibberella fujikuroi
MVRNIAIAALLPAAWALPSSSLQERDACTVTDYSGLATAVSSCTNIVLAGFQVPAGKQLDLSKLKAGTTVTFKGKTTFATTADNDFDPIVISGSGITITGASGHVIDGNGQAYWDGEGSNNKDNPKPDHFIVVKKTTGNSKITNLNIQNWPVHCFDITGSSQLTISGLILDNRAGDKPNAKSGSLPAAHNSDGFDISSSDHVTLDNNHVYNQDDCVAVTSGTNIVVSNMYCSGGHGLSIGSVGGKSDNVVDGVQFLNSQIVNSENGCRIKSNSGTTGTINNVTYQNIALTNISKYGVDVQQDYLNGGPTGKPTNGVKISNIKFTKVTGTVASSAQNWYILCGDGSCSGFTFSGNAITGGGKTSSCNYPSNTCPS

SEQ ID NO: 20676 - protein, 370 aa, Fusarium oxysporum
MVRNIAIAALLPAAFASTLPRDPCSVTDYSGLATAVSSCTNIVLNGFQVPTGKALDLSKLKDGATVTFKGKTTFATTADNDFDPIVISGNGITITGASGHVIDGNGPAYWDGEGSNNKDNPKPDHFIVVKKTTGNSKITNLNIQNWPVHCFDITGSSQLTISGLILDNRLGDKPNAKSGSLPAAHNSDGFDISSSDHVTLDNIHVYNQDDCVAVTSGTNIIVSNMYCSGGHGLNIGSVGGKSNNVVNGVQFLDSQIVNSENGCRIKSNSGTTGTIANVTYQNISLTNISKYGVDVQQDYLNGGPTGKPTNGVKISGIKFIKVTGTVASSAQDWYILCGDGSCSGFTFSGNAITGGGKTSSCNYPTNTCPS

SEQ ID NO: 20677 - protein, 371 aa, Fusarium oxysporum; identical to SEQ ID NO: 20556

SEQ ID NO: 20678 - protein, 374 aa, Fusarium sacchari
MVRNIAIAALLPAAWALPSTQLKERDACTVTDYSGLATAVSSCTNIVLAGFQVPTGKQLDLSKLKAGTTVTFKGKTTFATTADNDFDPIVISGSGITITGASGHVIDGNGQAYWDGQGSNNQDNPKPDHFIVVKKTTGNSKITNLNIQNWPVHCFDITGSSDLTISGLILDNRAGDKPNSKSGGLPAAHNSDGFDISSSDHVTLDNNHVYNQDDCVAVTSGTNIVVSNMYCSGGHGLSIGSVGGKSNNVVDGVQFLNSQIVNSENGCRIKSNSGTTGTINNVTYQNIALTNISKYGVDVQQDYLNGGPTGKPTNGVKISNIKFTKVTGTVASSAQNWYILCGDGSCSGFTFSGNAITGGGKTSSCNYPTNTCPS

SEQ ID NO: 20679 - protein, 374 aa, Fusarium sacchari
MVRNIALAALLPAAWALPSTQLKERDACTVTDYSGLATAVSSCTNIVLAGFQVPTGKQLDLSKLKAGTTVTFKGKTTFATTADNDFDPIVISGSGITITGASGHVIDGNGQAYWDGQGSNNQDNPKPDHFIVVKKTTGNSKITNLNIQNWPVHCFDITGSSDLTISGLILDNRAGDKPNSKSGGLPAAHNSDGFDISSSDHVTLDNNHVYNQDDCVAVTSGTNIVVSNMYCSGGHGLSIGSVGGKSNNVVDGVQFLNSQIVNSENGCRIKSNSGTTGTINNVTYQNIALTNISKYGVDVQQDYLNGGPTGKPTNGVKISNIKFTKVTGTVASSAQNWYILCGDGSCSGFTFSGNAITGGGKTSSCNYPTNTCPS

SEQ ID NO: 20680 - protein, 507 aa, Fusarium venenatum
MYRAIATASALIAAVRAQQVCSLTPETKPALSWSKCTSSGCSNVQGSVTIDANWRWTHQLSGSTNCYTGNKWDTSICTSGKVCAEKCCIDGAEYASTYGITSSGNQLSLSFVTKGTYGTNIGSRTYLMEDENTYQMFQLLGNEFTFDVDVSNIGCGLNGALYFVSMDADGGKAKYPGNKAGAKYGTGYCDAQCPRDVKFINGQANSDGWQPSKSDVNGGIGNLGTCCPEMDIWEANSISTAHTPHPCTKLTQHSCTGDSCGGTYSEDRYGGTCDADGCDFNAYRQGNKTFYGPGSGFNVDTTKKVTVVTQFHKGSNGRLSEITRLYVQNGKVIANSESKIAGVPGSSLTPEFCTAQKKVFGDIDDFEKKGAWGGMSDALEAPMVLVMSLWHDHHSNMLWLDSTYPTDSTKLGAQRGSCSTSSGVPADLEKNVPNSKVAFSNIKFGPIGSTYKEGQPEPTNPTNPNPTTPGGTVDQWGQCGGTNYSGPTACKSPFTCKKINDFYSQCQ

SEQ ID NO: 20681 - protein, 370 aa, Fusarium oxysporum
MVRNIAIAALLPAAFASTLPRDPCSVTDYSGLATAVSSCTNIVLNGFQVPTGKALDLSKLKDGATVTFKGKTTFATTADNDFDPIVISGNGITITGATGHVIDGNGPAYWDGEGSNNKDNPKPDHFIVVKKTTGNSKITNLNIQNWAVHCFDITGSSQLTISGLILDNRLGDKPNAKSGSLPAAHNSDGFDISSSDHVTLDNIHVYNQDDCVAVTSGTNIIVSNMYCSGGHGLSIGSVGGKSNNVVNGVQFLDSQIVNSENGCRIKSNSGTTGTIANVTYQNISLTNISKYGVDVQQDYLNGGPTGKPTNGVKISGIKFIKVTGTVASSAQDWYILCGDGSCSGFTFSGNAITGGGKTSSCNYPTNTCPS

SEQ ID NO: 20682 - protein, 371 aa, Fusarium oxysporum; identical to SEQ ID NO: 20556

SEQ ID NO: 20683 - protein, 85 aa, Fusarium oxysporum
PTAVPVKGSYDGGMKRFERSPSVCQGQSETGEKDAMFILENGATLSNVIIGASQAEGVHCKGTCTLNNVWWADVCEDAVTLKQTS

SEQ ID NO: 20684 - protein, 455 aa, Fusarium oxysporum
MLFNNVISAVAVSALVSSVVGTSSRNSALPKRPHVEAAPYGTGKAFPASPARSRKDFCYVNPGKGKNVDDAPSILKAFKKCNKGGTIVLDQKYSIASPLDLTWLAHVDVIITGEVNFKSDPYYWADHSFKYDFQNMSSFWKIGGKDIHIYGDLTKGESLLDGHGQAYWEEMAVNKTLLRPILLTIEDAHGLTMSNLRMRNPPNWFNIIINSTDVLISDLDLEAKSLNGVKIANSDGWDTYRSDRIVIQNSVIDNTDDCVSFKPNSTNVVVQNLVCNGSHGISVGSLGQYKGETDIVENLYIYNISMSNASDGARIKVWPGVETAFQSLLNGGGGLGRVRNVTYDTFYHENNDNAITITQCYGQKNQTLCNEFPANLTIEDVTMKNFWGTVSTKYDPRAGSLVCSAPDRCSNIVAEDIKVQVPSKKPPVYDCQNIDTSTLDITCRDPTNARDTTNG

SEQ ID NO: 20685 - protein, 455 aa, Fusarium oxysporum; identical to SEQ ID NO: 20570

SEQ ID NO: 20686 - protein, 374 aa, Fusarium anthophilum
MVRNIAIAALLPAAWALPSSSLQERDACTVTDYSGLATAVSSCTNIVLNGFQVPTGKQLDLSKLKAGTTVTFKGKATFATTADNDFDPIVISGSGITITGASGHVIDGNGQAYWDGQGSNNADNPKPDHFIVVKKVTGTSKITNLNIQNWPVHCFDITGSSDLTISGVILDNRAGDKPNSKSGGLPAAHNSDGFDISSCDHVTLDNNHVYNQDDCVAVTSGTNIVVSNMYCSGGHGLSIGSVGGKSNNVVDGVQFLNSQIVNSENGCRIKSNSGTTGTINNVTYQNIALTNISKYGVDVQQDYLNGGPTGKPTNGVKISNIKFTKVTGTVASSAQNWYILCGDGSCSGFTFSGNAITGGGKTSSCNYPTNTCPS

SEQ ID NO: 20687 - protein, 370 aa, Fusarium oxysporum; identical to SEQ ID NO: 20654

SEQ ID NO: 20688 - protein, 371 aa, Fusarium oxysporum; identical to SEQ ID NO: 20556

SEQ ID NO: 20689 - protein, 511 aa, Fusarium poae
MYRAIATASALIAAVRAQQVCSLTTETKPALTWSKCTSSGCSNVQGSVTIDANWRWTHQVSGSTNCHTGNKWDTSVCTSGKVCAEKCCVDGADYASTYGITSSGNQLSLSFVTKGSYGTNIGSRTYLMEDENTYQMFQLLGNEFTFDVDVSNIGCGLNGALYFVSMDADGGKAKYPGNKAGAKYGTGYCDAQCPRDVKFINGQANSDGWEPSKSDVNGGIGNLGTCCPEMDIWEANSISTAYTPHPCTKLTQHACTGDSCGGTYSNDRYGGTCDADGCDFNAYRQGNKTFYGPGSGFNVDTTKKVTVVTQFHKGSNGRLSEITRLYVQNGKVIANSESKIAGNPGSSLTSDFCTTQKKVFGDIDDFAKKGAWNGMSDALEAPMVLVMSLWHDHHSNMLWLDSTYPTDSTALGSQRGSCSTSSGVPADLEKNVPNSKVAFSNIKFGPIGSTYNKEGTQPQPTNPTNPNPTNPTNPGTVDQWGQCGGTNYSGPTACKSPFTCKKINDFYSQCQ

SEQ ID NO: 20690 - protein, 98 aa, Fusarium poae
MKFSLAAVTLLGAVVSALPANEKRQAYVPCTGLYGSSQCCATDVLGVANLDCGTPPSVPANATDFSAVCAEIGQRARCCVLPILDQGILCNTPTGVQD

SEQ ID NO: 20691 - protein, 370 aa, Fusarium oxysporum
MVRNIAIAALLPAAFASTLPRDPCSVTDYSGLATAVSSCTNIVLNGFQVPTGKALDLSKLKDGATVTFKGKTTFATTADNDFDPIVISGNGITITGASGHVIDGNGPAYWDGEGSNNKDNPKPDHFIVVKKTTGNSKITNLNIQNWPVHCFDITGSSQLTISGLILDNRLGDKPNAKSGSLPAAHNSDGFDISSSDHVTLDNNHVYNQDDCVAVTSGTNIIVSNMYCSGGHGLSIGSVGGKSNNVVNGVQFLDSQIVNSENGCRIKSNSGTTGTIANVTYQNISLTNISKYGVDVQQDYLNGGPTGKPTNGVKISGIKFIKVTGTVASSAQDWYILCGDGSCSGFTFSGNAITGGGKTSSCNYPTNTCPS

SEQ ID NO: 20692 - protein, 371 aa, Fusarium oxysporum
MVRNIAIAALLPAAFASTLPKRDPCSVTDYSGLATAVSSCTNIVLNGFQVPTGKALDLSKLKDGATVTFKGKTTFATTADNDFDPIVISGNGITITGASGHVIDGNGPAYWDGEGSNNKDNPKPDHFIVVKKTTGNSKITNLNIQNWPVHCFDITGSSQLTISGLILDNRLGDKPNAKSGSLPAAHNSDGFDISSSDHVTLDNNHVYNQDDCVAVTSGTNIIVSNMYCSGGHGLSIGSVGGKSNNVVNGVQFLDSQIVNSENGCRIKSNSGTTGTIANVTYQNISLTNISKYGVDVQQDYLNGGPTGKPTNGVKISGIKFIKVTGTVASSAQDWYILCGDGSCSGFTFSGNAITGGGKTSSCNYPTNTCPS

SEQ ID NO: 20693 - protein, 384 aa, Fusarium oxysporum
MHTFSVLLALAPVSALAQAPIWGQCGGNGWTGATTCASGLKCEKINDWYYQCVPGSGGSEPQPSSTQGGGTPQPTGGNSGGTGLDAKFKAKGKQYFGTEIDHYHLNNNPLINIVKAQFGQVTCENSMKWDAIEPSRNSFTFSNADKVVDFATQNGKLIRGHTLLWHSQLPQWVQNINDRSTLTAVIENHVKTMVTRYKGKILQWDVVNEIFAEDGNLRDSVFSRVLGEDFVGIAFRAARAADPAAKLYINDYNLDKSDYAKLTRGMVAHVNKWIAAGIPIDGIGSQGHLAAPSGWNPASGVPAALRALAASDAKEIAITELDISGASANDYLTVMNACLAVPKCVGITVWGVSDKDSWRPGENPLLYDSNYQPKAAFNALVNAL

SEQ ID NO: 20694 - protein, 454 aa, Fusarium oxysporum
MLFNNVLSAVAVSVLVSSVVGTSSRNSALPKRPHVEAAPYGTGKAFPASPARSRKDFCYVNPGKGKNVDDAPSILKAFKKCNKGGTIVLDQKYSIASPLDLTWLAHVDVIITGEVNFKSDPYYWADHSFKYDFQNMSSFWKIGGKDIHIYGDLTKGESLLDGHGQAYWEEMAVNKTLLRPILLTIEDAHGLTMSNLRMRNRPIGSTLSSTARTCLISDLELEAKSLNGVKIANSDGWDTYRSDRIVIQNSVIDNTDDCVSFKPNSTNVVVQNLVCNGSHGISVGSLGQYKGETDIVENLYIYNISMSNASDGARIKVWPGVETAFQSLLNGGGGLGRVRNVTYDTFYHENNDNAITITQCYGQKNQTLCNEFPANLTIEDVTMKNFWGTVSTKYDPRAGTLSASTRRCSTSWLRILKSRFQGKKPPVYDCQNIDTSTLDITCRDPTNARDTTNG

SEQ ID NO: 20695 - protein, 274 aa, Fusarium oxysporum
ISGNGITITGASGHVIDGNGPAYWDGEGSNNKDNPKPDHFIVVKKTTGNSKITNLNIQNWPVHCFDITGSSQLTISGLILDNRLGDKPNAKSGSLPAAHNSDGFDISSSDHVTLDNIHVYNQDDCVAVTSGTNIIVSNMYCSGGHGLSIGSVGGKSNNVVNGVQFLDSQIVTSENGCRIKSNSGTTGTIANVTYQNISLTNISKYGVDVQQDYLNGGPTGKPTNGVKISGIKFIKVTGTVASSAQDWYILCGDGSCSGFTFSGNAITGGGKTSS

SEQ ID NO: 20696 - protein, 361 aa, Fusarium oxysporum
MFSSTVLLSGLVASVLAAPALEPRAGSCTFTDAATAIKNKAGCSTITLNNIAVPAKTTLDLTKLNDGTHVIFQGKTTFGYAEWEGPLISFTGNNLLIEGAAGHSIDCEGKRWWDGKGSNGGKKKPKFFSAHSLKNSNIKNLNVLNTPVQAFSINSVTNLGVYGVHMDNSLGDSLGGHNTDAFDVGSSTGVYISGAVVKNQDDCLAINSGTNITFTGGNCSGGHGLSIGSVGGRSDNTVKTVRILNSSISNSDNGVRIKTVSGATGSVSDVKYDTITLSNIAKYGIVIEQDYENGSPTGTPTAGVPMTDVTINKVTGTVSSPAGTEVYILCANCKNWTWNNNKVTGGKTSTKCKGIPSGASC

SEQ ID NO: 20697 - protein, 274 aa, Fusarium oxysporum
ISGNGITITGASGHVIDGNGPAYWDGEGSNNKDNPKPDHFIVVKKTTGNSKITNLNIQNWPVHCFDITGSSQLTISGLILDNRLGDKPNAKSGSLPAAHNSDGFDISSSDHVTLDNIHVYNQDDCVAVTSGTNIIVSNMYCSGGHGLSIGSVGGKSNNVVNGVQFLDSQIVNSENGCRIKSNSGTTGTIANVTYQNISLTNISKYGVDVQQDYLNGGPTGKPTNGVKISGIKFIKVTGTVASSAQDWYILCGDGSCSGFTSSGNAITGGGKTSQ

SEQ ID NO: 20698 - protein, 240 aa, Fusarium oxysporum
MKYTAILALAGVSSAAVTKTLPKSAGATSFPTAVPVKGSYDGGMKRFERSPSVCQGQSETGEKDAMFILENGATLSNVIIGASQAEGVHCKGTCTLNNVWWADVCEDAVTLKQTSGTSYINGGGAFHASDKIVQFNGRGTVQIKDFYAEDYGKLVRSCGNCKDNGGPRNVVISGSVAVDGGVLCGINTNYGDTCKITSSCQNKGKYCDRYEGNSSGAEPSKIGSGPDGKYCTTSGVTTSC

SEQ ID NO: 20699 - protein, 371 aa, Fusarium oxysporum; identical to SEQ ID NO: 20556

SEQ ID NO: 20700 - protein, 370 aa, Fusarium oxysporum; identical to SEQ ID NO: 20565

SEQ ID NO: 20701 - protein, 455 aa, Fusarium oxysporum; identical to SEQ ID NO: 20574

SEQ ID NO: 20702 - protein, 455 aa, Fusarium oxysporum; identical to SEQ ID NO: 20684

SEQ ID NO: 20703 - protein, 374 aa, Gibberella nygamai
MVRNIAIAALLPAAWALPSSSLQERDACTVTDYSGLATAVSSCTNIVLTGFQVPTGKQLDLSKLKAGTTVTFKGKTTFATTADNDFDPIVISGSGITITGASGHVIDGNGQAYWDSKGSNNKNNPKPDHFIVVKKTTGNSKITNLNIQNWPVHCFDITGSSQLTISGLILDNRAGDKPNAKSGNLPAAHNSDGFDISSSDHVTLDNNHVYNQDDCVAVTSGTNIVVSNMYCSGGHGLSIGSVGGKSNNVVDGVQFLNSQIVNSENGCRIKSNSGTTGTINNVTYQNIALTNISKYGVDVQQDYLNGGPTGKPTNGVKISNIKFTKVTGTVASSAQNWYILCGDGSCSGFTFSGNAITGGGKTSSCNYPTNTCPS

SEQ ID NO: 20704 - protein, 455 aa, Fusarium oxysporum
MLFNNVLSAVAVSVLVSSVVGTSSRNSALPKRPHVEAAPYGTGKAFPASPARSRKDFCYVNPGKGKNVDDAPSILKAFKKCNKGGTIVLDQKYSIASPLDLTWLAHVDVIITGEVNFKSDPYYWADHSFKYDFQNMSSFWKIGGKDIHIYGDLTKGESLLDGHGQAYWEEMAVNKTLLRPILLTIEDAHGLTMSNLRMRNPPNWFNIIINSTDVLISDLELEAKSLNGVKIANSDGWDTYRSDRIVIQNSVIDNTDDCVSFKPNSTNVVVQNLVCNGSHGISVGSLGQYKGETDIVENLYIYNISMSNASDGARIKVWPGVETAFQSLLNGGGGLGRVRNVTYDTFYHENNDNAITITQCYGQKNQTLCNEFPANLTIEDVTMKNFWGTVSTKYDPRAGFLVCSAPDRCSNIVAEDIKVQVPSKKPPVYDCQNIDTSTLDITCRDPTNARDTTNG

SEQ ID NO: 20705 - protein, 455 aa, Fusarium oxysporum
MLFNNVLSAVAVSVLVSSVVGTSSRNSALPKRPHVEAAPYGTGKAFPASPARSRKDFCYVNPGKGKNVDDAPSILKAFKKCNKGGTIVLDQKYSIASPLDLTWLAHVDVIITGEVNFKSDPYYWADHSFKYDFQNMSSFWKIGGKDIHIYGDLTKGESLLDGHGQAYWEEMAVNKTLLRPILLTIEDAHGLTMSNLRMRNPPNWFNIIINSTDVLISDLELEAKSLNGVKIANSDGWDTYRSDRIVIQNSVIDNTDDCVSFKPNSTNVVVQNLVCNGSHGISVGSLGQYKGETDIVENLYIYNISMSNASDGARIKVWPGVETAFQILLNGGGGLGRVRNVTYDTFYHENNDNAITITQCYGQKNQTLCNEFPANLTIEDVTMKNFWGTVSTKYDPRAGSLVCSAPDRCSNIVAEDIKVQVPSKKPPVYDCQNIDTSTLDITCRDPTNARDTTNG

SEQ ID NO: 20706 - protein, 371 aa, Fusarium oxysporum
MVRNIAIAALLPAAFASTLPKRDPCSVTDYSGLATAVSSCTNIVLNGFQVPTGKALDLSKLKDGATVTFKGKTTFATTADNDFDPIVISGNGITITGASGHVIDGNGPAYWDGEGSNNKDNPKPDHFIVVKKTTGNSKITNLNIQNWPVHCFDITGSSQLTISGLILDNRLGDKPNAKSGSLPAAHNSDGFDISSSDHVTLDNIHVYNQDDCVAVTSGTNIIVSNMYCSGGHGLSIGSVGGKSNNVVNGVQFLDSQIVNSENGCRIKSNSGTTGTIANVTYQNISLTNISKYGVDVQQDYLNGGPTGKPTNGVKISGIKFIKVTGTVASSAQDWYILCGDGSCSGFTFSGNAITGGGKTSSCNYPANTCPS

SEQ ID NO: 20707 - protein, 360 aa, Fusarium oxysporum
MFSSTVLLSGLVASVLAAPALEPRAGSCTFTDAATAIKNKAGCSTITLNNIAVPAKTTLDLTKLNDGTHVIFQGKTTFGYAEWEGPLISFTGNNLLIEGAAGHSIDCEGKRWWDGKGSNGGKKKPKFFSAHSLKNSNIKNLNVLNTPVQAFSINSVTNLGVYGVHMDNSLGDSLGGHNTDAFDVGSSNGVYISGAVVKNQDDCLAINSGTNITFTGGNCSGGHGLSIGSVGGRSDNTVKTVRILNSSISNSDNGVRIKTVSGATGSVSDVKYDTITLSNIAKYGIVIEQDYENGSPTGTPTAGVPITDVTINKATGTVKSSGTDVYILCAHCKNWTWTNNKVTGGKTSTKCKGIPSGASC

SEQ ID NO: 20708 - protein, 371 aa, Fusarium oxysporum
MVRNIAIAALLPAAFASTLPKRDPCSVTDYSGLATAVSSCTNIVLNGFQVPTGKALDLSKLKDGATVTFKGKTTFATTADNDFDPIVISGNGITITGASGHVIDGNGPAYWDGEGSNNKDNPKPDHFIVVKKTTGNSKITNLNIQNWAVHWFDITGSSQLTISGLILDNRLGDKPNAKSGSLPAAHNSDGFDISSSDHVTLDNIHVYNQDDCVAVTSGTNIIVSNMYCSGGHGLSIGSVGGKSNNVVNGVQFLDSQIVNSENGCRIKSNSGTTGTIANVTYQNIPLTNISKYGVDVQQDYLNGGPTGKPTNGVKISGIKFIKVTGTVASSAQDWYILCGDGSCSGFTFSGNAITGGGKTSSCNYPTNTCPS

SEQ ID NO: 20709 - protein, 360 aa, Fusarium oxysporum
MFSSTVLLSGLVASVLAAPALEPRAGSWTFTDAATAIKKKAGCSTITLNNIAVPAKTTLDLTKLNDGTHVIFQGKTTFGYAEWEGPLISFTGNNLLIEGAAGHSIDCEGKRWWDGKGSNGGKKKPKFFSAHSLKNSNIKNLNVLNTPVQAFSINSVTNLGVYGVHMDNSLGDSLGGHNTDAFDVGSSNGVYISGAVVKNQDDCLAINSGTNITFTGGNCSGGHGLSIGSVGGRSDNTVKTVRILNSSISNSDNGVRIKTVSGATGSVSDVKYDTITLSNIAKYGIVIEQDYENGSPTGTPTAGVPITDVTINKVTGTVKSSGTDVYILCANCKNWTWTNNKVTGGKTSTKCKGIPSGASC

SEQ ID NO: 20710 - protein, 371 aa, Fusarium oxysporum
MVRNIAIAALLPAAFASTLPKRDPCSVTDYSGLATAVSSCTNIVLNGFQVPTGKALDLSKLKDGATVTFKGKTTFPTTADNDFDPIVISGNGITITGASGHVIDGNGPAYWDGEGSNNKDNPKPDHFIVVKKTTGNSKITNLNIQNWPVHCFDITGSSQLTISGLILDNRLGDKPNAKSGSLPAAHNSDGFDISSSDHVTLDNIHVYNQDDCVAVTSGTNIIVSNMYCSGGHGLSIGSVGGKSNNVVNGVQFLDSQIVNSENGCRIKSNSGTTGTIANVTYQNISLTNISKYGVDVQQDYLNGGPTGKPTNGVKISGIKFIKVTGTVASSAQDWYILCGDGSCSGFTFSGNAITGGGKTSSCNYPTNTCPS

SEQ ID NO: 20711 - protein, 371 aa, Fusarium oxysporum
MVRNIAIAALLPAAFASTLPKRDPCSVTDYSGLATAVSSCTNIVLNGFQVPTGKALDLSKLKDGATVTFKGKTTFATTADNDFDPIVISGNGITITGASGHVIDGNGPAYWDGEGSNNKDNPKPDHFIVVKKTTGNSKITNLNIQNWPVHCFDITGSSQLTISGLILDNRLSDKPNAKSGSLPAAHNSDGFDISSSDHVTLDNIHVYNQDDCVAVTSGTNIIVSNMYCSGGHGLSIGSVGGKSNNVVNGVQFLDSQIVNSENGCRIKSNSGTTGTIANVTYQNISLTNICKYGVDVQQDYLNGGPTGKPTNGVKISGIKFIKVTGTVASSAQDWYILCGDGSCSGFTFSGNAITGGGKTSSCNYPTNTCPS

SEQ ID NO: 20712 - protein, 360 aa, Fusarium oxysporum
MFSSTVLLSGLVASVLAAPALEPRAGSCTFTDAATAIKNKAGCSTITLNNIAVPAKTTLDLTKLNDGTHVIFQGKTTFGYAEWEGPLISFTGNNLLIEGAAGHSIDCEGKRWWDGKGSNGGKKKPKFFSAHSLKNSNIKNLNVLNTPVQAFSINSVTNLGVYGVHMDNSLGDSLGGHNTDAFDVGSSNGVYISGAVVKNQDDCLAINSGTNITFTGGNCSGGHGLSIGSDGGRSDNTVKTVRILNSSISNSDNGVRIKTVSGATGSVSDVKYDTITLSNIAKYGIVIEQDYENGSPTGTPTAGVPITDVTINKVTGTVKSSGTDVYILCANCKNWTWTNNKVTGGKTSTKCKGIPSGASC

SEQ ID NO: 20713 - protein, 360 aa, Fusarium oxysporum
MFSSTVLLSGLVASVLAAPALEPRAGSCTFTDAATAIKNKAGCSTITLNNIVVPAKTTLDLTKLNDGTHVIFQGKTTFGYAEWEGPLISFTGNNLLIEGAAGHSIDCEGKRWWDGKGSNGGKKKPKFFSAHSLKNSNIKNLNVLNTPVQAFSINSVTNLGVYGVHMDNSLGDSLGGHNTDAFDVGSSNGVYISGAVVKNQDDCLAINSGTNITFTGGNCSGGHGLSIGSVGGRSDNTVKTVRILNSSISNSDNGVRIKTVSGATGSVSDVKYDTITLSNIAKYGIVIEQDYENGSPTGTPTAGVPITDVTINKVTGTVKSSGTDVYILCANCKNWTWTNNKVTGGKTSTKCKGIPSGASC

SEQ ID NO: 20714 - protein, 455 aa, Fusarium oxysporum
MLFNNVISAVAVSALVSSVVGTSSRNSALPKRPHVEAAPYGTGKAFPASPARSRKDFCYVNPGKGKNVDDAPSILKAFKKCNKGGTIVLDQKYSIASPLDLTWLAHVDVIITGEVNFKSDPYYWADHSFKYDFQNMSSFWKIGGRDIHIYGDLTKGESLLDGHGQAYWEEMAVNKTLLRPILLTIEDAHGLTMSNLRMRNPPNWFNIIINSTDVLISDLDLEAKSLNGVKIANSDGWDTYRSDRIVIQNSVIDNTDDCVSFKPNSTIVVVQNLVCNGSHGISVGSLGQYKGETDIVENLYIYNISMSNASDGARIKVWPGVETAFQSLLNGGGGLGRVRNVTYDTFYHENNDNAITITQCYGQKNQTLCNEFPANLTIEDVTMKNFWGTVSTKYDPRAGSLVCSAPDRCSNIVAEDIKVQVPSKKPPVYDCQNIDTSTLDITCRDPTSARDTTNG

SEQ ID NO: 20715 - protein, 455 aa, Fusarium oxysporum
MLFNNVISAVAVSALVSSVVGTSSRNSALPTRPHVEAAPYGTGKAFPASPARSRKDFCYVNPGKGKNVDDAPSILKAFKKCNKGGTIVLDQKYSIASPLDLTWLAHVDVIITGEVNFKSDPYYWADHSFKYDFQNMSSFWKIGGKDIHIYGDLTKGESLLDGHGQAYWEEMAVNKTLLRPILLTIEDAHGLTMSNLRMRNPPNWFNIIINSTDVLISDLDLEAKSLNGVKIPNSDGWDTYRSDRIVIQNSVIDNTDDCVSFKPNSTNVVVQNLVCNGSHGISVGSLGQYKGETDIVENLYIYNISMSNASDGARIKVWPGVETAFQSLLNGGGGLGRVRNVTYDTFYHENNDNAITITQCYGQKNQTLCNEFPANLTIEDVTMKNFWGTVSTKYDPRAGSLVCSAPDRCSNIVAEDIKVQVPSKKPPVYDCQNIDTSTLDITCRDPTSARDATNG

SEQ ID NO: 20716 - protein, 371 aa, Fusarium oxysporum; identical to SEQ ID NO: 20556

SEQ ID NO: 20717 - protein, 370 aa, Fusarium oxysporum
MVRNIAIAALLPAAFASTLPRDPCSVTDYSGLATAVSSCTNIVLNGFQVPTGKALDLSKLKDGATVTFKGKTTFATTADNDFDPIVISGNGITITGATGHVIDGNGPAYWDGEGSNNKDNPKPDHFIVVKKTTGNSKITNLNIQNWPVHCFDITGSSQLTISGLILDNRLGDKPNAKSGSLPAAHNSDGFDISSSDHVTLDNIHVYNQDDCVAVTSGTNIIVSNMYCSGGHGLNIGSVGGKSNNVVNGVQFLDSQIVNSENGCRIKSNSGTTGTIANVTYQNISLTNISKYGVDVQQDYLNGGPTGKPTNGVKISGIKFIKVTGTVASSAQDWYILCGDGSCSGFTFSGNAITGGGKTSSCNYPTNTCPS

SEQ ID NO: 20718 - protein, 455 aa, Fusarium oxysporum; identical to SEQ ID NO: 20574

SEQ ID NO: 20719 - protein, 455 aa, Fusarium oxysporum; identical to SEQ ID NO: 20570

SEQ ID NO: 20720 - protein, 455 aa, Fusarium oxysporum; identical to SEQ ID NO: 20569

SEQ ID NO: 20721 - protein, 370 aa, Fusarium oxysporum; identical to SEQ ID NO: 20565

SEQ ID NO: 20722 - protein, 371 aa, Fusarium oxysporum; identical to SEQ ID NO: 20556

SEQ ID NO: 20723 - protein, 360 aa, Fusarium oxysporum; identical to SEQ ID NO: 20561

SEQ ID NO: 20724 - protein, 455 aa, Fusarium oxysporum; identical to SEQ ID NO: 20559

SEQ ID NO: 20725 - protein, 371 aa, Fusarium oxysporum; identical to SEQ ID NO: 20556

SEQ ID NO: 20726 - protein, 370 aa, Fusarium oxysporum; identical to SEQ ID NO: 20565

SEQ ID NO: 20727 - protein, 360 aa, Fusarium oxysporum; identical to SEQ ID NO: 20568

SEQ ID NO: 20728 - protein, 444 aa, Nectria haematococca
MKCTSIAALGAALAGTLVSAVPAGFVTTNGEKFSLDGEDFFFAGSNAYYFPFNVWGTDHYQDVKVGLVAAKDAGLKVIRTWAFHENNRTYVSGGLPKYNTGGEETVMQFFNSDGTVDIDLGVLDVVIEAAEATGMKLILALTNNWADYGGMDVYTVNLGGKYHDDFYRLPAIKKAYKNYVSAVVNRYKDSPAVFAWELANEPRCGADGSRNLPRGPDCGPELLTSWMDEMSTFIKSLDADHLVTTGSEGGFNRVSSDWAYNGADGADFDAELKLPNIDFNTFHSYPQAWSKTTQWVEQWIVDHAEAANGKPVVHEEYGWTDKSTRVSVLSKWQEVSLQHEVSDMYWQFGYSGYSYGKNHDDGNTIYLEDDEAQPLVYQHAAAVNGGEVPPPSSTTIGTTPGPTQTNGPRQVKYGQCGGSGWTGPTLCESGSTCQVQNQWYSQCL

SEQ ID NO: 20729 - protein, 219 aa, Nectria haematococca
MACLGYTGGVPNPTDHISNSKVIEVKAGQVYDGKWAKYDRGSGACKGQNEGGDKDAVFLLHEGATLKNVIIGKDQSEGVHCKGHCTLEFVWFEDVCEDAISIKEDKAGKESWIIGGGAYHASDKVVQHNGCGTVNIINFYVEDYGKLYRSCGNCSKQCKRNVYIEGVTAKNGGELAGINANYGDTATLKNVCADTKQKCTMYNGCAGGCEPKKIGACPA

SEQ ID NO: 20730 - protein, 244 aa, Nectria haematococca
MKASALIIAAVTGASAAVTTVLPASAGVQSEPTAIPVRKGDKYNGGMKRFVRNPTTCKDQYETGEKDASFILEDGATLSNVIIDRSSGEGVHCKGTCTLNNVWWADVCEDAATFKQKSGTSTINGGGAFSAQDKVLQFNGRGTLNVNDFYVQDYGKLVRNCGNCEGNGGPRNINIKGVVAKNGGELCGVNHNYGDVCTITDSCQNKGKSCQAYTGNDQKKEPPKFGPAGDNGKSCLVKSLRTNC

SEQ ID NO: 20731 - protein, 235 aa, Nectria haematococca
MLSKSIIGAILAWPALVAAAPHNVEERATPELTITQKLRLADTEIDRFKLLPDDKDFVFDFNKQDGLAAGVANAVTFPALVGTGQTFTVGQFEPCSMAVVHIHPRAAELQAVISGRIYTEMVPESGVTDAEGNQRVIRNEIGAKMMTVFYQGSFHTQMNPDCEPAVVVTTFSSEDMGASLIANNLFALKNETIANTFGQSIAGEDIDKVRDAIPKTITFKVEECLAKCGKTKRQA

SEQ ID NO: 20732 - protein, 468 aa, Nectria haematococca
MTAYKLLFTAALAGTAFAAPLVEERQACAAQWAQCGGFSWNGATCCQSGSYCSKINDYYSQCIPGEGPATSKSSTLPASTTTTQPTSTSTAGTSSTTKPPPAGSGTATYSGNPYSGVNLWANSYYRSEVTNLAIPKLSGAMATAAAKVADVPSYQWMDSFDHISLMEDTLVDIRKANLAGGNYAGQFVVYDLPDRDCAAAASNGEYSLDNDGANKYKNYIQTIKKIIQSYSDIRILLVIEPDSLANLVTNMDVAKCAKAHDAYISLTNYAVTELNLPNVAMYLDAGHAGWLGWPANQGPAAKLFASIYKDAGKPAALRGLATNVANYNAWSLSSAPPYTQGASIYDEKSFIHAMGPLLEQNGWPGAHFITDQGRSGKQPTGQIQWGDWCNSKGTGFGIRPSANTGDSLLDAFVWVKPGGESDGTSDTSATRYDYHCGASAALQPAPEAGTWFQAYFEQLLTNANPSFL

SEQ ID NO: 20733 - protein, 242 aa, Nectria haematococca; identical to SEQ ID NO: 20590

SEQ ID NO: 20734 - protein, 627 aa, Nectria haematococca
MAAVRICVCGDESTGKSSLIASLVKDQFVSNRIQPVLPQITIPPSIGTPENVSTTIVDTSARPQDRTTLRKEIRKCNVILLVYADHYSYERVALFWMPYFRSLGVNVPVVLCANKSDLAGQGTTPQVVEEEMLPVMAEFREIDSCIRTSARDHRNVNEVFFLCQKAVTHPIAPLFDYKEGHLKPACVSALMRIFYLCDKDQDGYLNEQEMRDFQARCFDKPLTADDLDNIKLSISKTLPTSDLERGIDLPGFLQLNKLYAEKGRHETIWIILRKYHYTDSLSLEDKFIRPKFDVPEYASAELSPAGYRFFVDLFLLFDKDNDGGLNDRELEALFAPTSGLPSSWTDSSFPSSTVRNEAGHITLQGWLAQWSMTTFIEPKTTIEYLAYLGFEPPNPKDPITAALKITKPRKRRRRPGRVERNVVLCYVLGASGAGKSALLDSFLNRPFDGLYHPTIKPRRAVNSVELPGGKQVYLILEELGELEPAILENQAKLDACDLICYAYDSSDPDSFSHIVNLRSKYPHLDELPSIYTALKADKDKTNQRSELQPDQYASSLSMSLPLHVSVTWGSISELFVAYADAATNPSTAFPKSNEEGPDRTSLYVALGATACAGVAALMIWRRATNAI

SEQ ID NO: 20735 - protein, 231 aa, Nectria haematococca
MHSASLVSLIAALPAAMACLGYEGGLPTPTDSKSLSAPQYIKAGQTFDAGWVKYDRGQSCSGQSEGGEADTVFVLEEGATLRNVIIGKNQKEGVYCLGSCNLEFVWFEDVCEDAISIKGDGTANIIGGGAYKASDKVIQHNGCGHVNIVNFYANDYGKVYRSCGNCKNNCARSVHMEGTTAVNGGELIGINTNLGDKATYSNNCYPKVQCQGYNGCDKANGDCEPTKAALC

SEQ ID NO: 20736 - protein, 481 aa, Nectria haematococca
MSRISYKSPLPRGLFIIILHNASFGYAPWARHGWPAIRAVHYYPPYQRCCSTNAKVNEVNQTTGQTLSYDTSVGLFDFNGPIELSIQPSEKVYPSIETVRVRPLSYNLKADVHGRTIKLALTKPANLVVEVNGDVFRVLHLFSDEIQKDTISRDEAKKDSSILYYGAGYHELKDQVNITSGQTVYLAPGSFVKGGFNFQNASNAAILGRGVLYKSPYDAITINYSKNIRVQGVTVINPGHYSAMMGSSDGVTVSGLRSISAVKWGDGIDVFCCQNVVLEKLFMRNSDDCVAMYQHRWDYYGDSKNLTLRDSSLWADLAHPIHLGLHGNTVTPETMEDVTISNIDILDHREPQVDYQGCLAINVADENLLKNIQFQDIRVEDFRLGSLLSFKVLYNSKYSSGPGRGLHNITVKNLSYNGKGGNIPAIAGYDKDRRVEFVDFQGLEINGQHVWDGMRKPGWYSTSDFVPLYVGSHVVNLTYSS

SEQ ID NO: 20737 - protein, 376 aa, Nectria haematococca
MTKINFLLAALAGSAIAAPSVPLIDAPEHFKRADSCTFSGSSGAAAAMKAQSSCTTLTLNNVAVPAGTTLDLSKLKDGAHVVFKGTTTWGYKEWTGPLLKISGKKITVDGAGATLNADGARWWDGKGGNGGKKKPKFFAAHSLTDSVFNDLYIKNTPVQAVSINTVNGLTINKMTIDDAEGDSKGGHNTDGFDIGESTGVTINGAKVYNQDDCVAINSGKDITFSGGLCSGGHGLSIGSVGGRSNNVVDTVKFLNSQVTKSTNGLRVKTMKNTSGQVKGVTYSDITLSKISKYGILIEQNYDGGDLHGDPTSGLPITGLTLKNISGSGAVDAKGTNIAIVCGKTGCSNWTWSNVKVNGGKDYGSCQNVPSVATCKA

SEQ ID NO: 20738 - protein, 419 aa, Nectria haematococca
MLLRPIIRPHYEPTPLQPYKAFPTSSPRRKTCFVKPGKKGGDDASKILRAFKKCNNGGTVVLDQEYTICTQLDLRFLKHVDIALTGTVKFCDDVERWLPRTFQFPFQDGSSWWLFGGEDINIYGAGTGTIDGNGQAWYDAHAADSKVKRPLLFVTDGWEGGSITGLKLRQSPNWHNLIANSSDILISDIDIFSRSTSKNFAKNLDGWDTYRSDNIVIQNSYIDHDDDCVSFKPNSTNIIVQGLVCNSSHGISVGSLGQYPGVFDNIENLYIYNISMSNATDGARLKVWPGADVQKPEGWIGGGGEGRVRNVTYERFFNDNNDGAIKIDQCYGAVSAAECEADPSKVILTDILFKDFWGTVSKKNDPVAGSLICSSEDSCDNIRAENVTVTPPSGKDAKWACRNMDEELLDLNGVGCVDA

SEQ ID NO: 20739 - protein, 210 aa, Nectria haematococca
PQADGTSVLDAPMTIAAGETFDGKNVMFDRGVSCTGQDEGGDSDAVFILEAGASLSNVIIGPNQIEGVHCNGGCTLTNVWWDAVCEDAFSIKKQADGETTTINGGGAKGAEDKVIQHNGGGTVVINDFTVSDFGKLYRSCGNCKEMPARHVKVSGGSASEGKVLVGINPNMGDTASISGISVTNVKEQCVAFNGVTDGSEPEKVGSCDAD

SEQ ID NO: 20740 - protein, 125 aa, Nectria haematococca
MLQSATAKGINCDGSALCGDQKGFLDKVSDFVTDNINGVDPNYHFSNGERIACAGHICAFLQKTSNGASGQEVREAILRLKNHGCKGCGSAPFIDNDVDKGEPTANYVTSTCDDGVCNGALNPKK

SEQ ID NO: 20741 - protein, 508 aa, Nectria haematococca
MYRVLATASALLATARAQQACTLNTENKPALTWAKCTSSGCSNVRGSVVVDANWRWTHSTSSSTNCYTGNTWDKTLCPDGKTCADKCCLDGADYSGTYGVTSSGNQLNLKFVTVGPYSTNVGSRLYLMEDENNYQMFDLLGNEFTFDVDVNNIGCGLNGALYFVSMDKDGGKSRFSTNKAGAKYGTGYCDAQCPRDVKFINGVANSDEWKPSDSDKNAGVGKYGTCCPEMDIWEANKISTAYTPHPCKSLTQQSCEGDACGGTYSATRYAGTCDPDGCDFNPYRQGNKTFYGPGSGFNVDTTKKVTVVTQFIKGSDGKLSEIKRLYVQNGKVIGNPQSEIANNPGSSVTDSFCKAQKVAFNDPDDFNKKGGWSGMSDALAKPMVLVMSLWHDHYANMLWLDSTYPKGSKTPGSARGSCPEDSGDPDTLEKEVPNSGVSFSNIKFGPIGSTYTGTGGSNPDPEEPEEPEEPVGTVPQYGQCGGINYSGPTACVSPYKCNKINDYYSQCY

SEQ ID NO: 20742 - protein, 360 aa, Nectria haematococca
MISPLFMLAGFAASALALPTALEARAGCTFTDAASAIKGKASCSTIILNNIAVPAGTTLDLTKLKDGTHVIFQGKTTFGYKEWEGPLIAFTGNNLLIEGASGHSIDCQGQRWWDTKGSNGGKTKPKFFSAHSLKNSNIKNLNVLNTPVQAFSINGVTNLGVYGVHMDNSLGDTQGGHNTDAFDVGSSTGVYISGAVVKNQDDCLAINSGTNITFTGGNCSGGHGLSIGSVGGRSDNVVKTVRILNSVIANSDNGVRIKTVYGATGSVSDVKYDTITLQNIAKYGIVIEQDYDNGSPKGVPSAGVPITDVTINKVTGTVKSSGTDIYILCASCKNWTWTGNKVTGGKTSDKCKGVPTGASC

SEQ ID NO: 20743 - protein, 254 aa, Nectria haematococca
MKFSMVIAGLFASAAIATPQGNITPNTMGALEKRASFPIPASKGSVTYKSAQSVKGTFDGGMKTYGRGAKCTGQKEGGDKDAVFILENGATLKNVIIGADQIEGVHCKGSCTIENVWWKKVCEDALSLKGDGNALIKGGGATGASDKVIQHNGLGTVTIDGFTVVDFGKLYRSCGNCKKMGTRNVVVKNVKAYNGKLLTGINSNKGDKATISGTCATSVKKICTEYEGTVPGKEPKELRSGVSAACKYTTVKSC

SEQ ID NO: 20744 - protein, 384 aa, Nectria haematococca
MRYLLPLSGLTGLALAQNGAWQQCGGQNWSGSTTCISGYTCSFINDYYSQCVPGSNPNPPSTTLSTVTQPSSSPTNNPNPGTGKFVWVGTNEAGGEFGEGNLPGTLGKDYIFPDTAAIDTLIGQGYNTFRVQLKMERLTSTLTGSHNQAYLDGYSKVINHITSKGAYAVLDPHNYGRFFGNVITDTSAFQTWWKNFAAVFKNNDHVIFDTNNEYHSMDQTLVLKLNQAAIDGIRSTGAKQYIFVEGNQWSGAWSWPDVNDNMKALTDPEDKIVYQMHQYLDSDSSGTNEACVSSTIGAERVKAATAWLKKNGKVGIIGEFAGGANSQCKAAVQGMLDYLEDNSDVWKGVLWWAAGPWWGNYMYSFEPPSGTGYQYYNSLLKSYV

SEQ ID NO: 20745 - protein, 371 aa, Nectria haematococca
MTFFKTSSLLAFAYSAAKVAAHGHVDWLITNGVAFRGYDAPAMSWNPNQPPVVGWITGATDNGYVEPNSFSDPDIICHRAARPAKGHVTVEAGDKVVLQWNTWPESHKGPVIDYLAKCPGDCETADKNSLEFFKIGESGLLDMTMQSGRWAADVLVANSFSWTLQIPAQLEPGNYVLRHEIIALHGAGQTNGAQNYPQCFNLKVTGGGSLAPSGVKGTQLYKSNDPGILFNLYTSSLSYKIPGPTLVPGLPSTVGQLAPQATATSSATTPGQTQGPSSTSTTRSSSSTSLTISGVTTLRTVTATTTSSSSSSSSSSSKASPSPTDDDIICGPATGGLPKYSQCGGKDYTGPTVCQWGSTCQVLNPYYSQCL

SEQ ID NO: 20746 - protein, 374 aa, Gibberella thapsina
MVRNIAIAALLPAAWALPSNSLQERDACTVTDYSGLATAVSSCTNIVLAGFQVPTGKQLDLSKLKAGTTVTFKGKTTFATTADNDFDPIVISGSGITITGASGHVIDGNGQAYWDGEGSNNKDNPKPDHFIVVKKTIGNSKITNLNIQNWPVHCFDITGSSQLTISGLILDNRAGDKPNAKSGSLPAAHNSDGFDISSSDHVTLDNNHVYNQDDCVAVTSGTNIVVSNMYCSGGHGLSIGSVGGKSNNVVDGVQFLDSQIVNSENGCRIKSNSGTTGTINNVTYKNIALTNISKYGVDVQQDYLNGGPTGKPTNGVKISNINFTKVTGTVASSAQNWYILCGDGSCSGFTFAGNAIAGGGKTSSCNYPTNTCPS

SEQ ID NO: 20747 - protein, 286 aa, Nectria haematococca
MVAFSFLFAGLTLATGALSAPGAIPLSKRAGTPSSTGTHDGFYYSWWTDGGADATYTNGPGGEYTVKWSDGGNLVGGKGYNPGGRRTVEYSGTYSPEGNSYLVLYGWIKSPLIEYYVVESFGTYNPSSGGEKKGEVTSDGGTYDIYVSTRTNAPSIEGTQTFQQYWSVRREKRVGGSITTGNHFDAWAEAGLELGSFDYMIMATEGYFSSGSATITVGGSEPAESEASPVTSQPGSGSGSGSGSSGSNVSACAPQWGQCGGQSWTGATCCQSGTCTEHNPWYSQCL

SEQ ID NO: 20748 - protein, 406 aa, Nectria haematococca
MKLVSLILLFLGVSVEASRRKTCIVKAGGTNATDDAPAIIEAFEKCGRRGRVIFHPTTYHINSVLNITWLDDVYIDLKGTLLWSTDIEYWLQNSLDVGYQNQSTAFILGGNKVVLDGHGTGTLDGNGDYWYQWIRKQANSSNYPGRPHAITLNGLTNSIVRGVNFLRSQMWTMSIIYSHRVTNTDGADTIRSSFIKFDNWTVYSGDDSISLKANSTDVSITNSRFYNGLGIALGSIGQYNKQFETIERLHVDNCSFYNTLHAVYFKTWTDDQNGYPPNGGGGGLGFAADMSFKNLKSVGMRGAAVAISQCTRFRGAPGQGNCTNSQFQIRDISVKGLTGTTKSSRVASLQCSAVAPCTNISLFDTDLRFDNGTEAPDYLCGNVKGERGFECTGEPCTGPSATGECS

SEQ ID NO: 20749 - protein, 224 aa, Nectria haematococca
MSSLRQSLVTLALAMPLALACVAKNSIPEATETISNTEPIEVAAGEVFDGKGARYDRGADPITGQADTVFILREGATLRNVIIGPDQHEGVYCIGGGCTIENVWFEDVCEDAISIKEDAAGTTTNIIGGGAFHAADKVIQHNGCGAVNIKDFYAEDYGKVYRACGTCDACKRDVHVEGVSAYGGGEVVGINIETGDTAELVNVCTDAKTPCQLYDGPGSKAGEC

SEQ ID NO: 20750 - protein, 454 aa, Nectria haematococca
MLLGNLISVSAFCALLSPALAKPSHGLPKRPHVEVSPYSTGKDFPAPSKRDSHRYCYVKPGKGSNSNDASRILKAFKKCNNGGTIVLDKEYTVASPLDLTWLKHVDVVITGEVNFKPDPYYWAENSFKFPFQNMSSFWKVGGEDIHIYGDLSNEQSVLDGHGQAYWKEIETNKTLLRPILFTFEGAHGASMTNLRMRNSPNWFNIIANSTDVLISDLDIRASSLDGVKIANSDGWDTYRSDNVVIQNSYIDNTDDCVSFKPNSTNVLVQNLVCNGSHGISVGSLGQYKGETDIVENLYIYNISMSNASDGARIKVWPGIETKFQSLLNGGGGLGRVRNVTYDRFYHENNDNAITITQCYGQKNQTLCNEFPANLTIEDITLKNMWGTTSKKYDPRAGTLVCSAPDRCSNIVAENITVTVPSKEPPVYDCQNLDTTTLDITCVDPADKDRDTSQG

SEQ ID NO: 20751 - protein, 324 aa, Nectria haematococca
MKASMFLVGASAILASASPIRAPLEKRLVKRALTTEWVYEYVTVTVTEGDAPVTEKAVPTAVVFLEEPSQPAPEPTTEVKKPVSRRPKQQPTTTKVAPAPKPTYVEPEPEPTTEKPSVVVVTTKQEPTTSKEEAKPVATEESGSSSGSYDLSLEGDYTSIMLNYHNIHRANHSAPDLIWDDTLAGYAENTANGCVFEHDMTQGNGGYGQNLASWGATGDIDDMQKKSAAGGITNQWYNSEMGNWAFYGQENPPDGMDIQLYGHFTQVVWKDSTKVGCATVKCPAGSVLQYPSWYTVCNYNPQGNFGGRYGDNVLQPKGEKRVTV

SEQ ID NO: 20752 - protein, 227 aa, Nectria haematococca
VALPLVLAATAQGHIARDTACKDVHIFLAKGNNEPYPGRQGKLAGAICSGLDSCDYEDIQFYNPLEAPYCGSVFEGAKNGIQQITAYNKRCPDSKLVVSGYSQGGHVVGDILGGGGGVFFQDCVQEPNKGLDPKTRPANKIVAAMIFGDTRHTANQPYNVLSGAGKDGLFPRPGDQLANLAKYGDVLHNYCVDTDPICAQGDVVETHLNYFDVFTDDVAGWVKERVN

SEQ ID NO: 20753 - protein, 286 aa, Nectria haematococca
MKAFMPLVAFFGTVTAQLQQITNFGSNPSGAKMFIHVPTNLPSNPAIVVAIHYCQGTAQSYYQNTPYAQLSDQKGFIVIYPESPYSGTCWDVSSKATMTHDGGANSNSIANMVRYALQTYKANPAKVFVTGSSSGAMMTNVMAATYPDLFAAGIVYSGVPAGCFFTNSVNGWNSDCAQGRVNKSPADWAQMVKDAYPGYNGARPKMQIYHGGADNILLSPNYQETIDQWAGVFGYNSVSPQSSNNNVPQAGYKTDTFGPKLVGIFAQNVGHSVPVRGADDMKFFGL

SEQ ID NO: 20754 - protein, 488 aa, Nectria haematococca
MKAFLITSLLSALWANAQLIGPVGPTTALSQKTHECSILDYGAVNDNSTDVADSIEKAFKTCVLPHPGSRLIVPDGKYLIKRSVVLSNGTNWAFQLDGLITLAYGGNWTVDRELILQGFAGVGPLNATINGEGDGQFLQNGLTIINPVDFEFYSSNGKGAIQGQGYIYRNLADTFRPRLVRLISPIDTAVHDIILVDSPKFHIVFDFAENLEVYHLTIRGANLGSYDGVDVVGTNYWVHDIEVTNRDECVSVKSPSNHALIENLVCNQAGSGISIGSLNVSASISNVHARNINIIQGNNIAFIKTYPGGSGHVTNITFENFRSKASLYGLDINQYWQNTFEPDTGAVALSNLVFKNFSGSVADGAKRPPLFLAANDLSFAINVTVEDFSIWTESGTSVVNKISNVYGNGDDSYGEADRVKSLASGQSPTPYTSVYTVTATPSGWTAPSFPTWAAASTGYGTDVPIPVYTPAALWKPNGDYDKHYWGSF

SEQ ID NO: 20755 - protein, 374 aa, Gibberella thapsina
MVRNIALAALLPAAWALPSNSLQERDACTVTDYSGLATAVSSCTNIVLAGFQVPTGKQLDLSKLKAGTTVTFKGKTTFATTADNDFDPIVISGSGITITGASGHVIDGNGQAYWDGEGSNNKDNPKPDHFIVVKKTTGNSKITNLNIQNWPVHCFDITGSSQLTISGLILDNRAGDKPNAKSGSLPAAHNSDGFDISSSDHVTLDNNHVYNQDDCVAVTSGTNIVVSNMYCSGGHGLSIGSVGGKSNNVVDGVQFLDSQIVNSENGCRIKSNSGTTGTINNVTYKNIALTNISKYGVDVQQDYLNGGPTGKPTNGVKISNINFTKVTGTVASSAQNWYILCGDGSCSGFTFSGNAITGGGKTSSCNYPTNTCPS

SEQ ID NO: 20756 - protein, 307 aa, Nectria haematococca
MKATVLLSLLPALAQSAVIAPRQSRTGDGSQGDSDATQGDLGGRPPPRFPFPITKFPVAKETVVFENVKYIMPGEVFDGGMKRYERPEGSCNEQAEGTDADAVFNLMPGSTIRNVIIGKNQAEGIHALGDAWVENVWWEDVCEDALTSKGLNTQLRVIGGGARSATDKIFQDNSLGGKYNITGFYAEDFGTFYQSCGNCLNQAKRNATIQNVVAVNGLRMGIINPNYGDEFRLKNSQIDNVTSIVDKEIGNNVQTVPYYIGNGPDEKYALYNETRDHIVDFDGKVTNQYEPEDPYEWLSEFWPEGFN

SEQ ID NO: 20757 - protein, 401 aa, Nectria haematococca
MRFSAASIVALAASTAAQGTTPKSDLDASVWQGLSSVKETRSWQDLPRNRPAKRQSGWNPPSNLATPLKEVWDHCLKTYSDALGFKNYGWDQLIAGKGKLNMCVRWESDQPVTAAYREEIATTLQTQYNKWFKWLYGYDNFPYTDIKVNVVGWAVKDKSLLQGSTSGIDVYTDVDSEGIPQCSEKCGRFFHQDGNYNQCPGGADRHYDQSLWLTKGMAGGAGGDWGQRLGPEGVGHILLHEMGHTFALDDFYDWTPTGITNFVMLAGSSTTITDFDGWMLRNWWYELSRERGWQSGVSSGSSSGSSSPSAAASKPATTAAASKPTSTKAAVTKPTTTTTKAAAAKPTTTKASAPAAPTAQTGATAAAYAQCGGSSFTGPTTCVSGFKCVKSNEWYSQCVSA

SEQ ID NO: 20758 - protein, 484 aa, Nectria haematococca
MHSFRTLYLVGAFALTLVNAVSLPAGVPRDVSEFRDKHHYKPPHHGHRKIITIRPSKNDHDDASERFKRGVLKANGGGTLYLPKGKTFVIGKALDLTGLNDIHVHLDGEIRFTDDVEYWQENAWYHPFQKSIMFWKWGGKNIKIYGEGVIEGQGQRWWNEFEAGTGSILNPDNKYYRPILFYAENTTNLEISGIHLKDSPCWNNFIVSSKNIRYTDVVATALSNNGSIIPKNTDFMNTMNTSTVHIERAWVNIDDDCFSPKPNSSDLYVNTMYCNGTHGQSMGSLGQYEGEVSNVHDVHIENVWMLNGDYSGARIKVWAGEKTGTGYVNNVTFKNFWVARMDYGIFLDSCYFNKSAEECNKYPSGMDITNIHFENFTGYTSGVYGNAVARLSCSASESAVCSNITLKDFNVETPCGGKPVIICDGMHGDIGVDCVPYESEEAQAALKAKCKIPIVGIDTDPWGSGVIERKKDAFHPISREIGDD

SEQ ID NO: 20759 - protein, 233 aa, Nectria haematococca
MKFFALTTLLAATASALPTSNPAQELEARQLGRTTRDDLINGNSASCADVIFIYARGSTETGNLGTLGPSIASNLESAFGKDGVWIQGVGGAYRATLGDNALPRGTSSAAIREMLGLFQQANTKCPDATLIAGGYSQGAALAAASIEDLDSAIRDKIAGTVLFGYTKNLQNRGRIPNYPADRTKVFCNTGDLVCTGSLIVAAPHLAYGPDARGPAPEFLIEKVRAVRGSARGG

SEQ ID NO: 20760 - protein, 227 aa, Nectria haematococca
MLANIAITLAATITPVLACKGYEGGLPTPTSTKQISAPIYVKNGEVFDAGWAKYDRNPSSCSGQAEGGEKDTAFVVERGGTLRNVIIGKTVGEGVYCKGGGCNLEFVWFEDVCEDAISIVNRAGDVTNIIGGGAYHASDKIIQHNGCGKVNIINFYAEDYGKVYRSCGTCEKCAREVYIEGVTARKGGEVAGITKANGDKATLVNVCTDAKTPCQNYSGPGKKDGPC

SEQ ID NO: 20761 - protein, 289 aa, Nectria haematococca
MRASLDQTLLLSCPDIQIFGARETTVSPGFGSAGALIDMIKADHSGVTAEAIEYPACGGQSSCGGVQYGDSAKQGTEAVTTAVNDFHSRCPDSQIVLVGYSQGGHIMHNAICGGGDSGAGITDTAVPITASAVAQVKAAILLGDPRYVSGLAYGVGTCTSGGFDARPAGFVCPNAAKVQLYCDAEDPYCCDGNDANHHQQYVTLYGTEALAFVNGKLGASGEAAPVQPSTGSDDSAGGSPSATGGNGQEQGTNCAALWGQCGGQAFTGATCCSEGTCKQFNQYYSQCLN

SEQ ID NO: 20762 - protein, 380 aa, Nectria haematococca
MRTSTLLAVANLGTAFAAVQIYGQCGGGAFTGETDCADGSTCVEMNEWYSQCVPESTEAPATEVSSVEEEEENNDAETAPVETSAPVVPSQPAEEEGDDEESAPVETSIAAVPSQPAEEGDNEESTPVVEPTSAAAAPTSGSGSGSGSGSGSGSGGITRTIPASSGSTAAATAIPVSGELDGGMMYYDRSPAVCKDQSETGEDDAMFILEDGATLRNVIIGPGQAEGVHCKGTCTLENVWFEDVCEDAITLKQKSGTSIIRGGGAFHASDKVVQFNGRGTVEISDFYVEDYGKLVRACGNCKDNGGPRNVVIENIAAVDGGVLCGINTNYGDTCTISNSCQDSGKTCDLFEGNSDGSEPTKLSSGPDGTSCKADSFSETC

SEQ ID NO: 20763 - protein, 258 aa, Nectria haematococca
MSMLLLAGTALAAPAAKSVAERANDSIDNVLPPIVPINTRSGDRDLIAKLITAPTQVERAKLLDQPGDYVFDFEAATGSGESKGKGGRSTSATALTMPALIGNGASMTVAFLGPCGMNTAHVHNRATELNIIVKGRLVTNFVIENGAKPIQNTMDTWQMSVFPKGAIHQEFNPDCEDAVFVAGFNDPDPGVNQIAQNFFSLNGDVVSATLGGVQTIDGKDIESFREVIPANIALGIDACLNKCGIKRNAKRSISEILA

SEQ ID NO: 20764 - protein, 208 aa, Nectria haematococca
MPSFTKTILLALAPFAAASPLAARQSGFSGSTQNGLEGACKDVTVIFARGTSEMGNVGSVAGPPFFQALAKEIGSDKLAVQGVEYPASIAGIMDLGSDGGKKMVAVVEQAYKKCPNTKVVLSGYSQGAMLVHNAAKSLPAATTSKIAAVVTFGDPFKSQSFQGIDEGRCKVFCRSGDSVCSGSFVITAAHLQYGQDAQAAADFVAGNL

SEQ ID NO: 20765 - protein, 100 aa, Nectria haematococca
MKFPVVLALASIVCALPASEKRQTYVPCTGLYGTSQCCATDILGLANLDCGNPPSTPSDADNFSAICAEIGQRARCCVLPIASTLLDQGVLCNTPSGVQD

SEQ ID NO: 20766 - protein, 401 aa, Nectria haematococca
MRSSTLIALVGPLAVHAASGNGHSTRYWDCCKPSCSWSGKASVSAPALTCDKNDNPISDADAKSGCDGGSAFACTNYSPFAVNDNLAYGFAATKLSGGSEATWCCACYALTFTTGPVKGKTMVVQSTNTGGDLGENHFDLQMPGGGVGIFDGCSSQFGGSGLGGAQYGGISSRSDCDKFPELLKDGCYWRFDWFQNADNPDFTFEQVQCPKALTDISGCKRNDDSSFPAYKGDTSSSGSTGSKASTSKAAVQSQKTQAPASTKVQQPSNPQTQVQSSASNPQKTQVQNSASNPQKTQVQNSASQPQQTQAPVKEPATPKTTKVGASKTRSGCSVPKKTKQTAQATAKASATKSAPATAQSAVAAWYQCGGSKSAYPNGNLPCASGSTCVQHNEYYAQCVPN

SEQ ID NO: 20767 - protein, 425 aa, Nectria haematococca
MPSFHQLSLLLGTILPAALAAPFASNHKLQEGVIHGKYIVTLKTDSDDTTVQSHLHWVEGVHRRSLSKRRIVGIQSTYNATNWHGYFGEFDEDTIKEIEASPEVAFIEPDHKIHLQGDYEDGKVYFWEQPGQISKRALTTQQGATWGLGTISHREPGFTTYTYDTSVGANSYAYVVDSGVQVNHSEFEGRAIAGYSVSPAAHVDTVGHGTHVAATIAGKTYGVAKKAQIISVKVSQGRESSNSASLQGFDWAVNDIVSKKRAGRSVINLSLGGPASQAWTAAIASAYKSGILAVVAAGSGDEDRNPLPTSRRSPANAPNALTVGAIDSDWNPTSFTNYGPEVDIMAPGDHIESAGIGSSNAVATMSGTSMACPHVAGLALYLQVKENLSAPAAVTKRIKALGTPGRISGNLNGSANLVAFNGVRQ

SEQ ID NO: 20768 - protein, 519 aa, Nectria haematococca
MYRAISLATALIASVRAQQACTSTQETHPPLTWSKCTSSGCTEVSGSVVVDANWRWTHTVEGSTNCYTGNKWDTSICPDGKTCAEKCCVDGADYAATYGVTTSGDQLSLSFVTKGAYATNVGSRLYLMEDDETYQMFSLLGNEFTFDVDVSQISCGVNGALYFVSMDEDGGKAKADGNKAGAKYGTGYCDAQCARDVKFINGEANVENWTPSESDPNSGTGNLGACCPEMDIWEANDISTAYTPHPCKTLTYHTCEGDDCGGTYSTTRYAGTCDPDGCDFNPFRQGNETFYGPGSEFTVDTTKKVTVVTQFIKGTSGGLSEIKRFYVQNGKVIGNPESKVASNPGNSVTEEFCSAQKKAFGDDDDFVAKGGFSQMSDALAAPMVLTMSLWDDHKANLLWLDSTYPVDSTGAGSKRGTCSTDSGVPKEVEAEAPNSKVSFSNIKFGPIGTTFEGGDSASSGSGSSSTSPSKAPSSGSDSSSAAGAYQRCGGQGWTGATTCVSGYTCKEQNTWYSQCVASA

SEQ ID NO: 20769 - protein, 516 aa, Nectria haematococca
MLAQVASVLLAAASVATAQSIVGTAYGFASGVTGGGAAAAAIPSSVEQLAEWLSDDTERVIVIDKEYDFTGTTATGAGCDRISCSSSNGGQLYLGDLSCGGSDNTAVSSISYDTAGTTALPVGSNKSIIGTNGKGVLKGKGLSLQKGASNVIIQGIEFTDINPGIVWGGDALDLQGGNDGVWVDHCKFSLVGRMFVVSHYDGSRLTLSNNEFDGVTTTSASCNGNHYWTMMFIGEGDQVTLDKNYFHDVSGRAPKLGADGVTCTFQASNNLFSNMKGHAFDGYNGATALIEGNAFESVNTPITESGASVSTFFNVPDESAAGSCESSLGRACAINSVDSSSGDWPSLSGSGALSTWSNLKEYLVEPVAASEVSSLVKGGAGPANLGTASSTDETESDATEPSTAESSPAVEEAEKTENAPAAAATSEAAAPVETAPVETAPAEAAPVESAPAETGSDNSDSDSGSEVAQWGQCGGLHYIGPTQCASGTSCVAHNDYYSQCVSSATRRMKRALRAKY

SEQ ID NO: 20770 - protein, 233 aa, Nectria haematococca
MHAPSIVTVLAALPAAMACLGYTGGVPKATGSKSLSAPKTLKKGEVFDAGWVRYDRGVKCSGQAEGGSKDAVFILEEGATLRNVIIGANQREGIHCKGSCNIEFAWFEDVCEDAISILGSGTANIIGGGAYHASDKVIQHNGCGHVNIVNFYANDYGKVYRSCGNCKGNTNCKRSVHMEGTTAVKGGELIGINTNYGDKATYSNNCYPKTQCQGYKGCDKSKGECEPSKAAKC

SEQ ID NO: 20771 - protein, 249 aa, Nectria haematococca
MYFSKLAISMLAATGAVAHPHARRAAQNDVVVVEYVTKVVTEYGTSQPTAAPQRQAKQHNWWTWKPSQPEQVEQPAATTVVVEAPKATSAPAASAPAASSGSSGSSSGNLDADQKGALDAHNAARAAVGNPDLVWDDELAAGALEYAKQLVGIGSLVHSGADGFGENLYQGGEGEETPLTNAVNMFNDEKKDYSGQAIDSTNYMTFGHYTQVVWKSTTKVGMAKAEGNGKCFVVARYQEPGNMIGEAAY

SEQ ID NO: 20772 - protein, 204 aa, Nectria haematococca
MRLLLLPLVSLLGVTLAADDVVTITAPAAIPSNEPEWKNDKTFVSAVLNSTDFYRAEHNASSLEWNRTLEDFATDYLDDNDDCEFEHSGGPYGENLAIGYGNTTASIEAWGDEREDYDFDKPKFSKATGHFSQLVWKDTTDVGCGRKLCGDRGWFLVCEYWPRGNVIGQFTDQVNKKEGNDAVRPRPGVALALAIVVGYLVVWV

SEQ ID NO: 20773 - protein, 228 aa, Nectria haematococca
MKFLPFVALLAGLSRALPLDAAANDGSLTTRALFSSDELLDGDAGSCPSAILVYARGSLEFGNLGFLGGLVGDGIKTVLGEDQVWTQGVGGDYSAAIGDNGLPDGTSPEAIQEMIGLFELADKKCPNATLVSGGWSQGAALVAASIRDLNPTIRGKIAGVILFGYTKNKQNNGRIPNYPADRLRVFCNDGDAVCEGELSITIPHLFYLSEARREAPEFLIEQINKYQA

SEQ ID NO: 20774 - protein, 98 aa, Fusarium culmorum
MKFSLAAVALLGAVVSALPANEKRQAYIPCSGLYGTSQCCATDVLGVADLDCGNPPSSPTDADNFSAVCAEIGQRARCCVLPILDQGILCNTPTGVQD

SEQ ID NO: 20775 - protein, 508 aa, Fusarium solani
MYRAIATASALLATARAQQVCTLNTENKPALTWAKCTSSGCSNVRGSVVVDANWRWAHSTSSSTNCYTGNTWDKTLCPDGKTCADKCCLDGADYSGTYGVTSSGNQLNLKFVTVGPYSTNVGSRLYLMEDENNYQMFDLLGNEFTFDVDVNNIGCGLNGALYFVSMDKDGGKSRFSTNKAGAKYGTGYCDAQCPRDVKFINGVANSDEWKPSDSDKNAGVGKYGTCCPEMDIWEANKISTAYTPHPCKSLTQQSCEGDACGGTYSATRYAGTCDPDGCDFNPYRQGNKTFYGPGSGFNVDTTKKVTVVTQFIKGSDGKLSEIKRLYVQNGKVIGNPQSEIANNPGSSVTDSFCKAQKVAFNDPDDFNKKGGWSGMSDALAKPMVLVMSLWHDHYANMLWLDSTYPKGSKTPGSARGSCPEDSGDPDTLEKEVPNSGVSFSNIKFGPIGSTYTGTGGSNPDPEEPEEPEEPVGTVPQYGQCGGINYSGPTACVSPYKCNKINDFYSQCQ

SEQ ID NO: 20776 - protein, 381 aa, Gibberella zeae
MHFLGLVVAFAPAALAQSAIWGQCGGTGWSGSTTCQSGLKCEKINDFYYQCIPGSDNGGGTTPDPGTPSPGNGNADATGLDAKIRAKGKIYFGTEIDHYHLSNNPLINIVKKDFGQVTNENSMKWDAIEPSRGQFTFSNADKVVDFAQANGKKIRGHTLLWYSQLPQWVKNIRDRATMTSVIENHVKTVVTRYKGKILHWDVVNEIFAEDGNMRNSEFYQVLGEDFVGIAFRAARAADPAAKLYINDYNLDIANYAKVTRGMVDHVNKWVSQGIPIDGIGSQAHLAKPGGWNPASGFPAALKVLAGANVKEVAITELDIDGAAANDYVTVVNSCLTTPKCVGITVWGVSDKDSWRSESNPLLFDRNYQPKAAYTAVSNALN

SEQ ID NO: 20777 - protein, 455 aa, Fusarium oxysporum; identical to SEQ ID NO: 20559

SEQ ID NO: 20778 - protein, 360 aa, Fusarium oxysporum; identical to SEQ ID NO: 20561

SEQ ID NO: 20779 - protein, 98 aa, Gibberella zeae; identical to SEQ ID NO: 20774

SEQ ID NO: 20780 - protein, 360 aa, Fusarium oxysporum; identical to SEQ ID NO: 20561

SEQ ID NO: 20781 - protein, 375 aa, Gibberella zeae
MRTSTLLTIANSGTAFAAVQMYNQCGGSAYSGDKECPSGSTCVEVSKWYSQCIPDSSSKKAASVEKTDFDFRAFGFPGFPAPPQAPPAEEDNSQGNDNTPAPFLSTIPTPEGPTNTPEQPVDDPVDTIIANPTTAPTSEPIETGSGSGSVAITRTIPASSGATAVATAIPVSGELDGGMAYYDRSPSVCKEQEETGEADAMFILGDGATLRNVIIGPGQAEGVHCKGTCTLENVWFEDVCEDAITLKQKSGTSIIRGGGAFHAADKVVQFNGRGTVEISDFYVEDYGKLVRSCGNCKDNGGPRNVVIENVAAVNGGVLCGINTNYGDTCTISNACQDKGKNCDLFEGNSDGSEPTKLSSGPDGTSCKVDSFAETC

SEQ ID NO: 20782 - protein, 455 aa, Fusarium oxysporum; identical to SEQ ID NO: 20559

SEQ ID NO: 20783 - protein, 355 aa, Gibberella zeae
MRSFALLALFGPLAVSAASGSGHSTRYWDCCKPSCSWSGKAKVSAPALTCDKKDNPITNLNAVNGCESGGSAFACTNYSPWAVNDDLAYGFTATKLAGGTEASWCCACYALTFTTGPVKGKKMIVQSTNTGGDLGDNHFDLMMPGGGVGIFDGCTSEFGKPLGGAQYGGISSRSQCDSFPELLKDGCHWRFDWFKNADNPDFTFEQVQCPKELLAISGCKRDDDSSFPAFKGNTTPSNAKPSGEKSAAAAQPQKPSTKAATEPIATKPATVKPAPVKPTKVVNKPKTASKVGGTKTRGKCPATKPTKPAAPQKSAVAIYHQCGGSKSAYPDGSLSCASGSKCVKMNDYYSQCVPN

SEQ ID NO: 20784 - protein, 370 aa, Fusarium oxysporum; identical to SEQ ID NO: 20654

SEQ ID NO: 20785 - protein, 512 aa, Gibberella zeae
MYRAIATASALIAAVRAQQVCSLTQESKPSLNWSKCTSSGCSNVKGSVTIDANWRWTHQVSGSTNCYTGNKWDTSVCTSGKVCAERCCLDGADYASTYGITSSGDQLSLSFVTKGPYSTNIGSRTYLMEDENTYQMFQLLGNEFTFDVDVSNIGCGLNGALYFVSMDADGGKAKYPGNKAGAKYGTGYCDAQCPRDVKFINGQANSDGWQPSDSDVNGGIGNLGTCCPEMDIWEANSISTAYTPHPCTKLTQHSCTGDSCGGTYSNDRYGGTCDADGCDFNSYRQGNKTFYGPGSGFNVDTTKKVTVVTQFHKGSNGRLSEITRLYVQNGKVIANSESKIAGVPGNSLTADFCTKQKKVFNDPDDFTKKGAWSGMSDALEAPMVLVMSLWHDHHSNMLWLDSTYPTDSTKLGSQRGSCSTSSGVPADLEKNVPNSKVAFSNIKFGPIGSTYKSDGTTPTNPTNPSEPSNTANPNPGTVDQWGQCGGSNYSGPTACKSGFTCKKINDFYSQCQ

SEQ ID NO: 20786 - protein, 455 aa, Fusarium oxysporum; identical to SEQ ID NO: 20570

SEQ ID NO: 20787 - protein, 371 aa, Fusarium oxysporum; identical to SEQ ID NO: 20556

SEQ ID NO: 20788 - protein, 370 aa, Fusarium oxysporum; identical to SEQ ID NO: 20717

SEQ ID NO: 20789 - protein, 92 aa, Penicillium chrysogenum
MQITSIAIVFFAAMGAVANPIARESDDLDARDVQLSKFGGECSLKHNTCTYLKGGKNHVVNCGSAANKKCKSDRHHCEYDEHHKRVDCQTPV

SEQ ID NO: 20790 - protein, 92 aa, Penicillium chrysogenum
MHITSIAIVFFAAMGAVASPIATESDDLDARDVQLSKFGGECSLKHNTCTYLKGGKNHVVNCGSAANKKCKSDRHHCEYDEHHKRVDCQTPV

SEQ ID NO: 20791 - protein, 435 aa, Penicillium simplicissimum
MLTSLSLTALALLPSANALVRKDGVGRLPALGWNSWNAFGCDVDSTKIMTAANEMVHLGLKDLGYEYVNIDDCWSVKNTRNSTTQRIIPDTQKFPDGISGVADQVHQLGLKIGIYSSAGETTCAGYPASLGYEKVDAEAFAEWGIDYLKYDNCGVPSNWTDQYSSCVPDGSNEPANGTCPGLSNPAPAGYDWTKSNTFTRYTMMRDALLGQTRTILYSLCDWGQADVNTWGNETGNSWRMSGDISANWARIAQIANENTFRMNYVGFWGHPDPDMLEVGNGDLTAAENRAHFALWAIMKSPLIIGTALDGISDANLAVLKNKYLIEFNQDPIIGRSAHPYKWGYNPDWTFDPAHPAEYWSGPSSTLKGTLVLMLNSENSTSTRTAVWKEIPELKGHNAYRVTDAWSGKDLGCVKKQYSASLASHDVAVLVVKEAC

SEQ ID NO: 20792 - protein, 382 aa, Penicillium purpurogenum
MKSLSFSFLVTLFLYLTLSSARTLGKDVNKRVTAGSLQQVTGFGDNASGTLMYIYVPKNLATNPGIVVAIHYCTGTAQAYYTGSPYAQLAEQYGFIVIYPQSPYSGTCWDVSSQAALTHNGGGDSNSIANMVTWTISQYNANTAKVFVTGSSSGAMMTNVMAATYPELFAAATVYSGVGAGCFYSSSNQADAWNSSCATGSVISTPAVWGGIAKNMYSGYSGSRPRMQIYHGSADTTLYPQNYYETCKQWAGVFGYNYDSPQSTLANTPDANYQTTNWGPNLQGIYATGVGHTVPIHGAKDMEWFGFSGSGSSSTTTASATKTSTTSTTSTKTTSSTSSTTTSSTGVAAHWGQCGGSGWTGPTVCESGYTCTYSNAWYSQCL

SEQ ID NO: 20793 - protein, 234 aa, Penicillium purpurogenum
MHSKFFAASLLGLGAAAIPLEGVMEKRSCPAIHVFGARETTASPGYGSSSTVVNGVLSAYPGSTAEAINYPACGGQSSCGGASYSSSVAQGIAAVASAVNSFNSQCPSTKIVLVGYSQGGEIMDVALCGGGDPNQGYTNTAVQLSSSAVNMVKAAIFMGDPMFRAGLSYEVGTCAAGGFDQRPAGFSCPSAAKIKSYCDASDPYCCNGSNAATHQGYGSEYGSQALAFVKSKLG

SEQ ID NO: 20794 - protein, 1011 aa, Penicillium expansum
MKLLSSLALAALAAQVSGAAISHKLDGFTLREHADASKRELLQKYVTWDKHSIFINGERLMMFSGEVHPYRLPVASLYIDVFEKIKALGFNCVSFYVDWALLEGKPGHYTAEGIFDLQPFFDAAKEAGIYLLARPGPYINAEVSGGGFPGWLQRVNGTLRTSIGDYLKSTDNYASHIAKTIAKAQITNGGPIILYQPENEYSGACCGYEDFPDGSYMQYIEDHARDAGIVVPFISNDAYAGGHNAPGTGKGAVDIYGHDGYPLGFDCANPSVWPDGNLPTNYHTLHEEQSPTTPFSVVEFQGGAFDPWGGVGFAKCAHLLNHEFERVFYKNDFSFGVTFFNLYMIFGGTNWGNLGHPGGYTSYDYGSAISESRNVTREKYSELKLLGNFAKVSPGYVVANPGNLTTSKYTKTADLTVTPLLGESSSAGSFFVIRHSNYNSQASVKYQLTLPTSAGELTIPQLGGELTLSGRDSKIHVTDYDVAGSNILYSTAEVFTWKKFDNGKVLILYGGPGEHHEFAVTGASASSVIEGSSSGITSKKIGDALVVAWDVSSKRRIIKIGDLKVFLLDRNSAYNYWVPHLPTKGKAPGYVSKKAIDSSIIVKAGYLVRSAFLSGKDLHIQADFNATTPIEIIGAPSSAKNLVINGKKTKTNVDDNGIWSASVSYSTPEIHLPSLKDLKWQSIDTLPEVKNSYDDSAWTSADQPHTLNTAHELQTPTTLFSSDYGYHTGTLLYRGHFVANGKESIFFIQTQGGSAYGHSVWVNETYVGSWEGSGSNDNYNATYTLPSLATGKKYAITVVIDNMGLDVNWVIGQEGMKNPRGIIRYNLAGHDASAISWKLTGNLGGEDYRDTVRGPLNEGGLYAERQGFHQPKPSTKNWDSSSPFTGLTKPGIRFYSASFDLDLPSGYDIPLYFNFGNSTAPPDAYRVQLFVNGYQYGKYVNNVGPQTSFPVPEGILNYHGTNWIALSLWAQQESGAKLNSFELINTTPVLTSLDKVKSVDQPKYKSRKGAY

SEQ ID NO: 20795 - protein, 1011 aa, Penicillium sp.
MKLLSSWVVAALAAQAAGAAISHKLDGFTIREHADPAKRALLQKYVTWDEHSIFVNGERLMIFSGEVHPYRLPVASLYIDIFEKVKALGFNCVSFYVDWALLEGNPGHYSAEGIFDLQPFFDAAKEAGIYLLARPGPYINAEVSGGGFPGWLQRVDGILRTSDEAYLKATDNYASNIAATIAKAQITNGGPIILYQPENEYSGACCGYNGFPDGSYMQYIEDHARDAGIVVPFISNDAWAAGHNAPGTGAGAVDIYGHDSYPLGFDCANPSTWPSGNLPTYFHTSHEQQSPSTPYSLVEFQGGAFDPWGGVGFAKCAALLNHEFERVFYKNDFSFGVAFLNLYMIFGGTNWGNLGHPGGYTSYDYGSAISESRNITREKYSELKLLGNFAKVSPGYLVANPGDLSTSTYTNTADLTVTPLLGSNSSASSFFVIRHSDYSSQASVEYKLTVPTSAGNLTIPQLGGSLTLSGRDSKIHVTDYDVAGTNILYSTAEVFTWKKFNNEKVLVLYGGPGEHHEFAVSGASSSSVVEGSSSGISSKKVGKALVVAWDVSTARRIVQVGSLKVFLLDRNSAYNYWVPQVPTKGTAPGYSNQETTASSIIVKAGYLVRSAYLDGNDLHIQADFNATTPIEVVGAPSGAKNLVINGKKTQTKVDKNGIWSASVAYTAPKVQLPSLKSLKWKSVDTLPEAKNTYDDSAWTSADHAYTNNSAHSLQTPTSLFASDYGYHTGALLFRGHFTANGKEKTFFVQTKGGTAYGHSIWINETYVGSWAGTSINDNNNATYTLPTLQSGKNYVITVVIDNMGLDEDWTIGSEDMKNPRGIIQYSLSGQEASAISWKLTGNLGGENYRDTVRGPLNEGGLYAERQGFHQPQPPTQKWDSSSPFTGLTKPGIRFYSTSFDLDLPSGYDIPLYFNFGNSTSTPAAYRVQLYVNGYQYGKYVNNIGPQTSFPVPEGILNYHGTNWLALSLWAQEDNGAKLDSFELINTTPVLTSLGEVKSVNQPKYQARKGAY

SEQ ID NO: 20796 - protein, 1013 aa, Penicillium chrysogenum
MTRILNCLLVLLACLGVSSKAEDQAVTQWPLQDNGLNTVVQWDHYSFQINGQRIFIFSGEFHYWRIPVPALWRDILEKIKAAGFTAFAFYSSWAYHAPNNATVDFTTGARDITPIFELAKELGMYIIVRPGPYVNAEANAGGFPLWVTTGDYGTLRNDDTRYTNAWTPYFTEVTEITSRYQVTDGHYSIVYQIENEYGNQWLGDPTLRVPNETAIAYMELLKANARDNGITLPLTVNDPNMKTHSWGKDWSDAGGNVDVAGLDSYPSCWTCDISQCTSTNGAYVPFQVLEYHDYFQESQPSMPAFMPEFQGGSYNPWGGPEGGCPGDIGDDFANLFYRWNIGQRVTAMSLYMMFGGQNPGAMAAPVTASSYDYSAPISEDRSIWSKYHETKLLALFTRSAKDLTMTELMGNGTQYTDNPAVRAYELRNPETNSAFYATFHSNTSISTNEPFHLKVNTSAGVLTVPKYASTIRLNGHQSKIIVTDFTFGSKSLLYSTAEVLTYAVFDKKPTLVLWVPTGESGEFSIKGAKKGSIKKCQGCSRVKFIKEHGGLTTSLTQSAGMTVLEFDDGVRVILLDRTSAYDFWAPALTNDPFVPETESVLIQGPYLVRDAKLSGSKLAITGDVVNATTLDVFAPKGVKSVTWNGKKVDTHSTEYGSLKGSLDAPQSIKLPALASWKSKDSLPERFADYDDSGAAWVDANHMTTLNPRTPTSLPVLYADQYGFHNGVRLWRGYFNGTATGAFINVQGGSAFGWSAWLNGEFLASHLGNATTSQANLSLSFTDATLHTDTPNVLLIVHDDTGHDQTTGALNPRGIMDAKLLGSDSGFTHWRLAGTAGGESDLDPVRGVYNEDGLFAERVGWHLPGFDDSDWGEEGSAKDSTTSVLSFEGATVRFFRTTCPLDIPAHTDVSISFVLSTPAGATTEYRAQLFVNGYQYGRYNPYIGNQVVYPVPVGILDYKGENTIGVAVWAQSEEGASIGIDWRVNYLADSSLDVASWDTKDLRPGWTEERVKYA

SEQ ID NO: 20797 - protein, 1009 aa, Penicillium marneffei
MAQLFTKIIVYFLLFASPLLANQWPLHNNSLNDVVQWDHYSFEINGQRLFVFAGEWHYWRIPVPELWIDILEKIKAAGFTAFGIYVNWAYHAPNNYTVDFATGAHDITPILKMAKDVGLYVLLRPGPYINAEVNAGGFPLWVTTGEYGSLRNDDSRYTAAWEPYFTKISEIASEYQITKGGNVVTYQIENEFGDQWTGSPSRRVQYEPAAKYMELLEANARRNGIDIPLVANEPNMRAISWGKDWSNSSANVDVVGLDSYPSCWTCDLSVCTGTTGEYIAYQVIDYYGYFQETQPTMPSFFAEFQGGSYNPWGGPVGGCPEDIGPDFANLFYRWNIGQRVTAINLYMLYGGTNWGAIAAPVVASSYDYSSPISENRTIGAKYYETKLLTMFTRAARDLIVTDLIGNGTQYSTNPAIQTHVIRNPITNGTFYVTLHTISSSSTDETFQLHVNTSAGAFSIPRYGNSIRLNGHQSKIIVTDFQFGTHKLLYSTAEVLTYTVLDGIPTLALWVPTGESGEFSVLGGKWASVLRCEWCSDIQFHPEQDQTSNPTVSRLTVSFTQGQGMSVIKLDTGLRVVLLDRESAYYFWAPALNSDPSVPEDQSVLVQGPHLVRSAKIVGSTIRLTGDSAQTSPIEVFAPKQVRIIFWNDKELKTSKTSYDSLQASLPQPAYVKLPLLGPWKYNGSLPEKAQDYKDTSAAWISADHMKTSNPSPPATFPVLYADEYGFHNSIRIWRGYFTGNATGVVLKVQGGYAFGFSGWLNGKLLGSYLGNASVEHSHLTLPFNVSHVSTSSDNVLVIVHDDTGHDETTGALNPRGILEATLLSDNSSSKFSHWRVAGTAGGETNIDPMRGPYNEGGLYAERMGWHLPGFNDNAWSDAGSKLNFTGADIKFYRTTVPLNIPKGVDVSISFELSACGTTNAFRSQLFVNGYQMGRFNPWVGNQIEFPVPPGILDYTGDNTIGLSLWAQTEDGACAIVDWKINYVLGSSLDVTFNGEYLRPGWTSERLQYS

SEQ ID NO: 20798 - protein, 982 aa, Penicillium chrysogenum
MRLFALLPVLLGLISSHFVSATDNGKTTDVTWDKYSLSVKGERVYVFSGEFHYQRLPVPELWLDVFQKLRANGFNAISIYFFWSFHSASEDTFDFENGAHDVQRVFDYAKQAGLYVIARAGPYCNAETSAGGFALWASNGQMGSTRTSASSYYDRWYPWIQEIGKIIAANQITNGGPVILNQHENELQETIHSADNTVVKYMEQIKAAFSDAGIIVPSTHNEKGMRSMSWSTDYQDVGGAVNIYGLDSYPGGLSCTNPNSGFNLVRTYYQWFQNYSSSQPEYLPEFEGGWFSAWGGSFYDQCSTELSPEFADVYYKNNIGSRVTLHNIYMVMGATSWGQSAAPVVYTSYDYSAPMRETREIRDKLKQTKLIGLFTRVSSGLLQTQMEGNGTGYTSDASIYTWALRNPETHAGFYVLAHSTSSSRAVTTTSLNVNTSAGALTIPNIELAGRQSKIIVTDYQTGDGSSLLYSSAEVLTYATLDVDVIVFYLNIGQKGEFAFKDAPTHLTFKTYGNSKVSSAKSDHGTKYTYCQGDGTTVLKFSHGVLVYLLDKETAWNFFAVPTTSNPRVAPSEQILALGPYLVRTASVSGHTVSLVGDNANATSLEVYTGNSKVTQIKWNGKETPTKKTAYGSLIGSAPGAEHAKLSLPTLKSWKAQDTLPEINPDYDDSRWTVCNKTTSVNSVAPLTLPVLYSGDYGYHAGTKIYRGRFDGVTATGANITVQNGVAAGWAAWLNGVYVGGAIGDPDLAATSAELEFTSSTLRRKDNVLTVVMDYTGHDQANVKPNGSQNPRGILGATLLGGDFTSWRIQGNAGGEANIDPVRGPMNEGGLYGERLGWHLPGYKGSKTATSESPLDGVSGAAGRFYTTTFKLDLDSDLDVPIGLQLGASADAPAVVQIFMNGYQFGHYLPHIGPQTRFPFPPGVINNRGENTLAISLWALTEQGARLSQVDLVAYGAYRTGFNFNHDWSYLQPQWENNRGQYV

SEQ ID NO: 20799 - protein, 999 aa, Penicillium marneffei
MFFFRFLTTVLLLFNAKLLVAQSSNTSSPVHWDKYSLSINGERLFVFAGEFHYIRLPVPELWLDVFQKLKANGFNAISVYFYWNHHSASEGVYDFETGGHNVQRLFDYAKQAGVYIIARPGPYANGELSAGGYALWAANGRLGGERTRDSQYYDLWSPWMTKIGKIIAANQITEGGPVILVQHENELQETTHRANNTLVLYMEQITQILDAAGIVVPSTHNEKGMRSMSWSMDYEDVGGAVNIYGLDSYPGGLSCTNPNAGFNLIRTYYQWFQNYSYTQPEYLAEFQGGYFTPWGGVFYDDCASMLQPEYADVFYKNNIGNRVTLQSLYMAYGGTNWGHIAAPVVYTSYDYSAPLRETREIRDKLKQTKLLGLFTRVSPDLLQTEMEGNGTSYTTGANIFTWALRNPETNAGFYVVAQDDSSSTTDVVFDLEVETSAGSVNITNIGLDGRQSKIITTDYKVGDTTLLYCSADILTYATLDVDVLALYLNKGQTGTFVLANAASHLKYTVYGNSTVTSSNSSQGTIYTYTQGQGISAIKFSNRFLVYLLDKYTAWDFFAPPLQLSDPNVKPNEHIFVIGPYLVREATIKGRTLELTGDNQNTTSIEIYHGNPFITSITWNGKHLSTKRTAYGSLTATIPGAEAITITLPKLTSWKSHDMIPEIDPEYDDSNWVVCNKTTSFNAIAPLSLPVLYSGDYGYHAGPKIYRGRFGSTNATGVTVTAQNGNAAGWSAWLNGIYIGGVTGDPSIEATSAVLKFNSSTTLKQEGSENVLTVLVDYTGHDEDNVKPARAQNPRGLLGVIFEGSTSTNFTSWKLQGNAGGEKNIDALRGPMNEGGFYGERLGWHLPGFEPSTKSGWDTRAPSDGVDGGSHRFYITEFTLDLGPNSHALDVPIGIHLNASSTSGPAVAYVWLNGYKFAHYLPHIGPQTVFPFQPGVLNIQGSEGHKRKNTLAVSLWALTDQPAALDVVELVAYGKYTSSFDFARDWSYLQPRWVDRSKYA

SEQ ID NO: 20800 - protein, 64 aa, Penicillium brevicompactum
DTCGSGYNVDQRRTNSGCKAGNGDRHFCGCDRTGVVECKGGKWTEVQDCGSSSCKGTSNGGATC

SEQ ID NO: 20801 - protein, 208 aa, Penicillium chrysogenum
MKFSLLALALATAAFASPMDIDARALSEGNELRNGDCKDITFIFARASTEPGLLILTHPNDRMSKPGKVACQGVGPKYTADLPSNALPGNTSPAAIAEAQGLFEQAAKKCPDTQILAGGYSQGTAVMDGSIKKLSSDVQAKIKGVALFGYTRNAQERGQIQGFDKDKTKIYCAVGDMVCQGTLVITAAHFTYVADAGAATRWLVSKLD

SEQ ID NO: 20802 - protein, 212 aa, Penicillium chrysogenum
MNFKLLSLLLAGLATAGPIEQRQTSSSGNELRDGPCQPVTFIFARASTEQGLLGGSTGPAVCNDLKSARNQEVACQGVGPKYQATLAANSLPAGTSDEAIEEAKGLFEQAASKCPDTQIVAGGYSQGTAVMHGAIPKLSDAIKDQIKGVVLFGDTRNQQDNEQIPDFPKDKTKIYCAVGDQVCHGSLIVAAPHFSYVADAGDASRFLVEKLD

SEQ ID NO: 20803 - protein, 608 aa, Penicillium minioluteum
MATMLKLLALTLAISESAIGAVMHPPGNSHPGTHMGTTNNTHCGADFCTWWHDSGEINTQTPVQPGNVRQSHKYSVQVSLAGTNNFHDSFVYESIPRNGNGRIYAPTDPPNSNTLDSSVDDGISIEPSIGLNMAWSQFEYSHDVDVKILATDGSSLGSPSDVVIRPVSISYAISQSDDGGIVIRVPADANGRKFSVEFKTDLYTFLSDGNEYVTSGGSVVGVEPTNALVIFASPFLPSGMIPHMTPDNTQTMTPGPINNGDWGAKSILYFPPGVYWMNQDQSGNSGKLGSNHIRLNSNTYWVYLAPGAYVKGAIEYFTKQNFYATGHGILSGENYVYQANAGDNYIAVKSDSTSLRMWWHNNLGGGQTWYCVGPTINAPPFNTMDFNGNSGISSQISDYKQVGAFFFQTDGPEIYPNSVVHDVFWHVNDDAIKIYYSGASVSRATIWKCHNDPIIQMGWTSRDISGVTIDTLNVIHTRYIKSETVVPSAIIGASPFYASGMSPDSRKSISMTVSNVVCEGLCPSLFRITPLQNYKNFVVKNVAFPDGLQTNSIGTGESIIPAASGLTMGLNISNWTVGGQKVTMENFQANSLGQFNIDGSYWGEWQIS

SEQ ID NO: 20804 - protein, 317 aa, Penicillium chrysogenum
MAPSFITIDANDMDVDFSTTKPVQAKRTLLLAPPSIATQEDKLRDLFSTFDRSTTDLQMLDRLSAGVVSLPATTYDLVLILTDTDGTRRSEALQLLTRNVYTTLVPAMKAGAKLQTQDSALNASDAMEAVLAGLVQSDNGFEKPNFEPSAAVPLKFGLKKKNKPTPTAVPSIPTGFAAPMGIDSPVTNHDRDEDDELINEDTLLSEEDLTRPIMPPPECQPKTGRRRRACKDCTCGLADKLEAEDKERRANADKELNVMKLDTGDLNELDFTVEGKTGSCGSCALGDAFRCDGCPYMGLPAFKPGQEVQILNDVAQL

SEQ ID NO: 20805 - protein, 305 aa, Penicillium marneffei
MPSLPVLIDTTPDFDFAPAQDATQKRTLLLAPPSIAAHEEKLRDIFATFDRSVTDLQMLDRLSAGFVTLPASAYDLVLVLTDTNGARRNEALGLLTRDVFNVLTPAMKPSAQLKLQDGPFQATEGREAILAGLVENNGAFEKPQYQEAAVPLRFGLKKKNKVAPEPVKVESVGFVDNYDDDELIDEDDLLAEEDLGRPVQQPAECKPDIAKKRRRACKDCTCGLAAQLEAEDAERREKANAELNVLKLKTDELNDEVDFTVQGKTGSCNSCSLGDAFRCEGCPFIGLPAFKPGEEVRIMNDMAQL

SEQ ID NO: 20806 - protein, 306 aa, Talaromyces stipitatus
MPSLPVLIDTTTEFDVSSPQNVTQKRSLLLAPPSIAAHEEKLRDIFTTFDRSVTDLQMLDRLSAGFVTLPASTYDLVLVLTDTNGARRNEALELLTRDIFNILTPSMKPSAQLQLQDGPFQANEGREAILAGLVEKHGAFEKPQYQEAAVPLRFGANKRKNKISPEPVKIESVGFVDNYDDDELINEDDLLDEEDLGKPVQQPAECQPETAKKRRRACKDCTCGLAAQLEAEDAERREKANADLNVLKLKTDELNDEVDFTVQGKTGSCNSCSLGDAFRCASCPFIGLPAFKPGEEVRIMNDMAQL

SEQ ID NO: 20807 - protein, 353 aa, Penicillium funiculosum
MAIPLVLVLAWLLPVVLAASLTQVNNFGDNPGSLQMYIYVPNKLASKPAIIVAMHPCGGSATEYYGMYDYHSPADQYGYILIYPSATRDYNCFDAYSSASLTHNGGSDSLSIVNMVKYVISTYGADSSKVYMTGSSSGAIMTNVLAGAYPDVFAAGSAFSGMPYACLYGAGAADPIMSNQTCSQGQIQHTGQQWAAYVHNGYPGYTGQYPRLQMWHGTADNVISYADLGQEISQWTTIMGLSFTGNQTNTPLSGYTKMVYGDGSKFQAYSAAGVGHFVPTDVSVVLDWFGITSGTTTTTTPTTTPTTSTSPSSTGGCTAAHWAQCGGIGYSGCTACASPYTCQKANDYYSQCL

SEQ ID NO: 20808 - protein, 587 aa, Penicillium amagasakiense
YLPAQQIDVQSSLLSDPSKVAGKTYDYIIAGGGLTGLTVAAKLTENPKIKVLVIEKGFYESNDGAIIEDPNAYGQIFGTTVDQNYLTVPLINNRTNNIKAGKGLGGSTLINGDSWTRPDKVQIDSWEKVFGMEGWNWDNMFEYMKKAEAARTPTAAQLAAGHSFNATCHGTNGTVQSGARDNGQPWSPIMKALMNTVSALGVPVQQDFLCGHPRGVSMIMNNLDENQVRVDAARAWLLPNYQRSNLEILTGQMVGKVLFKQTASGPQAVGVNFGTNKAVNFDVFAKHEVLLAAGSAISPLILEYSGIGLKSVLDQANVTQLLDLPVGINMQDQTTTTVSSRASSAGAGQGQAVFFANFTETFGDYAPQARDLLNTKLDQWAEETVARGGFHNVTALKVQYENYRNWLLDEDVAFAELFMDTEGKINFDLWDLIPFTRGSVHILSSDPYLWQFANDPKFFLNEFDLLGQAAASKLARDLTSQGAMKEYFAGETLPGYNLVQNATLSQWSDYVLQNFRPNWHAVSSCSMMSRELGGVVDATAKVYGTQGLRVIDGSIPPTQVSSHVMTIFYGMALKVADAILDDYAKSA

SEQ ID NO: 20809 - protein, 537 aa, Penicillium janthinellum
  MOD_RES (48)..(48): Any amino acid
  MOD_RES (64)..(64): Any amino acid
MKGSISYQIYKGALLLSALLNSVSAQQVGTLTAETHPALTWSKCTAGXCSQVSGSVVIDANWPXVHSTSGSTNCYTGNTWDATLCPDDVTCAANCAVDGARRQHLRVTTSGNSLRINFVTTASQKNIGSRLYLLENDTTYQKFNLLNQEFTFDVDVSNLPCGLNGALYFVDMDADGGMAKYPTNKAGAKYGTGYCDSQCPRDLKFINGQANVDGWTPSKNDVNSGIGNHGSCCAEMDIWEANSISNAVTPHPCDTPSQTMCTGQRCGGTYSTDRYGGTCDPDGCDFNPYRMGVTNFYGPGETIDTKSPFTVVTQFLTNDGTSTGTLSEIKRFYVQGGKVIGNPQSTIVGVSGNSITDSWCNAQKSAFGDTNEFSKHGGMAGMGAGLADGMVLVMSLWDDHASDMLWLDSTYPTNATSTTPGAKRGTCDISRRPNTVESTYPNAYVIYSNIKTGPLNSTFTGGTTSSSSTTTTTSKSTSTSSSSKTTTTVTTTTTSSGSSGTGARDWAQCGGNGWTGPTTCVSPYTCTKQNDWYSQCL

SEQ ID NO: 20810 - protein, 272 aa, Penicillium marneffei
MAPITQETVDGLKDIIHKLESRVADLESRLVHGSPASNSKSLAEQFRIILIGPPGAGKGTQAPRLKEKYCVCHLATGDMLRSQVAKKTPLGKEAKKIMDQGGLVSDEIMVNMIKSELETNSECKNGFILDGFPRTVAQAERLDDMLSARNEKLQHAVELQIDDALLVARITGRLVHPASGRSYHKIFNPPKQDMKDDITGEPLIQRSDDNAATLEKRLATYHAQTSPVVDYYKKTGIWCGIDASQEPGQVWKSLLGVFQPSSSILSKVGLSK

SEQ ID NO: 20811 - protein, 385 aa, Penicillium chrysogenum
MKFLTLALSATATAMIIVNPEQQPLAPSIVQNPQHKSLIELAPYRTRWVTEEEKWSLKLDGVNFIDVTDEYQSGSYGTLHTTRVVHYPGAMEHAHEILPLTETLDKSNMRSNLEHFTSFYTRYYKSQTGIESATWLFDQVTAAVHESGASDHGATVERFAHPWGQFSIIARIPGQTDNTVILGSHQDSINLFLPSILAAPGADDDGSGTVTILEALRALLRSETIAHGQARNTIEFHWYSAEEGGLLGSQAVYANYKKNQRNVKAMLQQDMTGYVQGTLDAGEKESVGVIIDYVDQGLTAFIKEVITTYCDVPYVETKCGYACSDHASASRYGYPSAFVIESQFENSDKRIHTTEDKIEYLSFDHMLQHAKMSLAFAYELAFAPF

SEQ ID NO: 20812 - protein, 511 aa, Penicillium citrinum
MRLPVSFPLTVLSLLGSTIAHPYGETEAVLRSEPKSNQAKADAVKEAFQHAWNGYMKYAFPHDELTPVSNGHADSRNGWGASAVDALSTAVIMGKADVVNAILEHVADIDFSKTSDTVSLFETTIRYLAGMLSGYDLLQGPAKNLVDNQDLIDGLLDQSRNLADVLKFAFDTPSGVPYNNINITSHGNDGATTNGLAVTGTLVLEWTRLSDLTGDEEYAKLSQKAESYLLKPQPSSSEPFPGLVGSSININDGQFADSRVSWNGGDDSFYEYLIKMYVYDPKRFETYKDRWVLAAESTIKHLKSHPKSRPDLTFLSSYSNRNYDLSSQHLTCFDGGSFLLGGTVLDRQDFIDFGLELVDGCEATYNSTLTKIGPDSWGWDPKKVPSDQKEFYEKAGFYISSGSYVLRPEVIESFYYAHRVTGKEIYRDWVWNAFVAINSTCRTDSGFAAVSDVNKANGGSKYDNQESFLFAEVMKYSYLAHSEDAAWQVQKGGKNTFVYNTEAHPISVARN

SEQ ID NO: 20813 - protein, 564 aa, Penicillium chrysogenum
MAFKFNWSPLIADASFYTRAQDLLTAALNKSPKPPIIVGDITVTELNLGSIPPELEILEIGDLAEDRFRGIFKMSYTGDAFLTLKTRVQANPLNTYLITRPSFASPLPLAAATPLTIPLQITLSDFKLSGFVILVFSEQKGITLVFRNDPLESLKVSSTFDSIPFVRDFLQGEIEAQLRILFIDELPAIIHRLSLQLWDPEYRAEEIQNQMNTTLTPTKGPGHDPLVTPPQDPVDSLGNVLDESDIASLSLDSAAETHSLFSQKNLLSLATLTDSQRTLSLFTPSIQQVVYRAWSSPDQNDSSASVMSPISPPLSRTQSQTGGIFASIDNASTSSAQSRTPTGPTQSFSSYGLSLGASRHSRAHARRRKKRVVDLRSRPTTPSDSASVSVSDESTYTESASAPSVTSAPLQAIHEQPDDPVTPPLSPESDQSLPAIVEERRLSLSRSLPRRDLSSEIVRDRAEPSEPRNPFNTDDVIVTVGSVRPTPHQEASPPLGPTRQLSAAGLPFPHDSSTGSVVDQVFLDTLAGEVARRMRDEKLMAPNSCGTFCGHGLPEEPPPPAYGQ

SEQ ID NO: 20814 - protein, 556 aa, Penicillium chrysogenum
MAFNFNWSPLMADASFYTRAQDLLTAALNKSPKPPIIVDDIHVTELNLGSIPPELEILEIGDLAEDRFRGIFKMSYTGDAFLTLKTRVQANPLNTFLLTRPTFGSPVPLAAATPLTIPLQITLSDFKLSGFVILVFSKQKGITVVFRNDPLESLKVSSTFDSIPFVRDFLQKEIEAQLRILFMDELPAIIHRLSLRLWVPEYRTGEEMNDETDNTAKSSEGPGQDPLASPPQDPVDSLGNALNESEIASLSLDSSVETHSLFSQKNLLRLAALTDSQRTLSLFTPSIQEVVYRAWTSPTDTSEFPSSVISPLSPTLSREQSQMGSMSSLHETASNASMQSRPSMSSHSFSTSTYGLSLGAGRHSKAHARKRKKRVVDLRRPKTTDDAMSVSDESVMTESSRPPSIASAPLPIVNEPSDDPVTPPLSPEVDCHLPIIPERHLPSFSRPTRRDADLSYSHETIRGPKAEDVDATPRATMRGYPQERAEAGPSSNQRTPLPAAVLPFSKDENANVDPVLVDRLAGEIARRMREDKLMTNACSGFWSRQHEDSPPPAYGH

SEQ ID NO: 20815 - protein, 485 aa, Penicillium chrysogenum
MLDFMDYIQLSFAEATHWNRDNSYSSLNTTAQSILDFSTPERLRVHLSSLSTPHFATSYTLGTVGLLDGSVSYLFSTVPFDNLPSGSASIPLRKISPGYRQVQAPATPIETWGWDSLLDGVSIPGLTNGSRPEPPIPKDEESIKESEAKRKATLLHASLHLPPPSTLYALFLRRISSNMQLSLAVCSTQGPPQSKSAPQASMLTQLSHDTGKYSNEYLFSTDNALFGWRGLWNFGPDPRYTRDVPPPLSLLSAGAEAYYSPISSLIGMSTGLRFTTLPAATEIPPSSSPSSTRTPISTFPYTLTLTLAPIVGSLSTTYSLRASPNLAFSSRFGFNVYSWESEMVAGCELWRRTKKSDSSSDDDLEWARRKMRMHDFGVSLPGSPASPLLEDPARPEGPVSSNAHTEAETSDSVIKLRIDQSWNVRLLWEGRVKELLVSAGVGLGPGSFSLSPSVSSASGSGSAQSGGGPGMSYWRGVGVSVLYSS

SEQ ID NO: 20816 - protein, 477 aa, Penicillium marneffei
MLEFMDYVQLAFAEATRWNQDNSYSALTATAESLLDFHVPERLQVRLSSLSTPHFATSYTLGTVGLIDGSVSYLFSTVPLNNTPSQSGLIPLRRLVRGYRQIEAPVPPRRNWGWDAIPSPNSLQNIDGAENNDDVVRKATLLHATLHLPPPSTLNALFLRRISPTTQITASLVSTQAPPLVKSAPSAALLAQISHDTGTFSNEYLFSTDNALFGWRGLWNIGLEPAPGKASTDKVSLLSAGAEAYYSPISSLVGLSTGLKFTTLPAASRTPSSSSSGSTPNPISSFPYTLTLTLTPLTGSLSTTYSARASPNLAFSSRFGFNVYSWESEMVAGCEIWRKSPRTEPVEVDDGLEWARRKMGIVKDLAAEKISSLSSSNNPQAIEEDEGDSVIKIRVDQSWNVRLLWEGRVKSLLVTAGVSLGPGSFTALSSIPSSPTSSSAPVAAAGTGSSQSSGGGAAPTSRPSYWQGVGVSILYSS

SEQ ID NO: 20817 - protein, 472 aa, Talaromyces stipitatus
MLEFMDYVQLAFAEATRWNQDNSYSSLTAIAESLLDFHVPERLQVHLSSLSTPHFATSYTLGTVGLIDGSVSYLFSTVPLNNTPSQSGVIPLRRLVRGYRQIEAPVPPIRNWGWDAIPSHDSSQIIDSADINQDDIVRKATLLHATLHLPPPSTLNALFQRRISPTTQITAALVSTQGPPLIKSAPSAALLAQISHDTGTFSNEYLFSTDNALFGWRGLWNIGLDPSPGKQSTDKVSLLSAGAEAYYSPISSLVGLSTGLKFTTLPAAGRALSSSSSSSPGSNPSPISSFPYTLTLTLTPLTGSLSTTYSARASPNLAFSSRFGFNVYSWESEMVAGCEIWRKSPRTQPAEADDGLDWARRKMGIVKERAAEKISALSSSSSTPQAVEESEGDSVVKIRVDQSWNVRLLWEGRVKSLLVTAGVSLGPGTFTALSSGPASPTSSSAPVAMAGAPPTSRPSYWQGVGVSILYSS

SEQ ID NO: 20818 - protein, 438 aa, Penicillium chrysogenum
MSIEVDWAAATSGPDGEALAERIRSFVHDKFQEITLPRFIRSVQVHSFDFGTIAPDLEVKDICEPFADFYEEEADDADTSVASEELGHELHESPYEDDMTYNPTAHNLHSFSHHPYPGEGFQPSALRSPLGDHLNPHFMPRASTPGIPGGTSTLGYHMRSLGGLSGTQTPLAAVAGGTSFASGWSDSGMGVGPRSQAARPAGPHHLAEPDLDTTNSTSRPSTANTLPSHPSLGHSGSSGSNPHTSDPTDAPQPSIETSDDPAAEGHSLPIPPRMRERRPEDFQVLCHAKYAGDVRMSLTAEILLDYPMPSFVGLPLKLNVTGITFDGVAVVAYIRKRVHFCFLSAEDADALLGSEQSQGSQNPSDDGRPRSGGDQKDKELKRQGGLLQEIRVDSEIGRKEDGKQVLKNVGKVERFVLAQVRRIFEEELVYPSFWTFLV

SEQ ID NO: 20819 - protein, 489 aa, Penicillium marneffei
MSIDLNWEAATSGPDGEQLAERIRCFIHDKFQQVPLPRFIRSVNVHSFEFGSIAPELEIKDICDPFVDFYEESDSEDEDEGHEDIQSDASSDRAAADKRGMRYRHDNNGHDEHGTNHHDHLRTSQWVTGEIDGHHQSAQSPLRSPIGLGDHLNAQFRSTTPNILPGVTSNLGYHLMMGNLSGTQTPLVAVAGGGTPFGTGWPDAVMHGGSQLAGQPHGRGRGREENNNNNLDTGSPSRPSTANTNPTQLSHGQSAAGSSSNNTSNDPTVIYNDHASSTTATAHGLHEGREKQAPTSIIDQESPPSPTPHMRERRPEDFQVICRVKYAGDVKLSLTAEILLDYPMPSFVGLPLKLNITGITFDGVAVVAYIRRRAHLCFLSPEDADALLGDEEEDINHQQRQQQQQQHPYPTTNTSESINNNNPETHPPQPRRRFGSLLQQIRVDSEIGRKENGKQALKNVGKVERFVLDQVRRIFEDEFVFPSFWTFLV

SEQ ID NO: 20820 - protein, 491 aa, Talaromyces stipitatus
MSIDLNWEAATSGPDGEQLAERIRSFIHDKFQQVPLPRFIRSVNVHSFEFGSIAPELEIKDICDPFVDFYEESDSSEDEDGEGHDAESDTSSDRAADSTADKRDMRYGHDDRGNNGHIPNHHDHLRTSQWVAGGTDGHSTQSPLRSPIGLGDHLNAHFRSTTPNILPGVTSNLGYHLMMGNLSGTQTPLAAVAGGTPFGPGWPDAVMNQGSRMTDHTTGRTRREDHNKNETGSPSRPSTAHTNPTQLSHGRSAASSSNNTSNDPTVIYNDHTSSTTATTYGLHEGGDRPRDKHGHRIDQEEPPPSPTPHMRERRPEDFQVICRVKYAGDVKLSLTAEILLDYPMPSFVGLPLKLNITGITFDGVAVVAYIRRRAHLCFLSPEDADALLGDEDDIQHPSYSTANTTTAASGSSTDNNNNNNESNDHPNHPPQPRRRFGSLLQQIRVDSEIGRKENGKQALKNVGKVERFVLDQVRRIFEDEFVFPSYWTFLV

SEQ ID NO: 20821 - protein, 565 aa, Penicillium marneffei
MAFNFNWSPLMADAGFYTRAQDLLTAALNKSPKPPIIVDDIKVTELNLGSIPPDLEILEVGDLAEDRFRGIFKMSYNGDAFLTLKTRVQANPLNTFLVTRPSFASPKPLAAASGLTIPLQITLSEFRLSGFVVLVFSKQKGITVVFRNDPLESLKVSSTFDSISFVRDYLQKAIEGQLRALFMDELPAIIHRLSLRLWVPEYRDRESESVNTLDLSSESGPGQDPLASPPQDPVDASGNALNPSEVASLSLDSGVEIHNLFSHKNLLRLAALTDSQRTLSLFTPSIKDVVYRAWTASAELGESNTLTSPTSPVLSRTHSHIGSLHSFVDNASTISMQSGGSSNFSGFGSYLRPGRHSRSHTKKRKKRVVDLRRPKTTDDVDSVSGDSVFSSENATSAPTIFSSPAHFSEEKNDDPVTPPLGPQNDLHLPTIHERRRISQGDQTLRRSNLSMSEAAQPSSSRSAQMIAETWPDPDATPRNTIRLPSNDRASNRFTAVSLPSSAIQYTPTVPINNNNPREQVWLSKMAAELARRMQEQKIDPSGSRPFPDFWDDHSREEIPPPAYGH

SEQ ID NO: 20822 - protein, 564 aa, Talaromyces stipitatus
MAFNFNWSPLMADAGFYTRAQDLLTAALNKSPKPPIIVDDIKVTELNLGSIPPDLEILEVGDLAEDRFRGIFKMSYNGDAFLTLKTRVQANPLNTFLVTRPSFASPKPLAAAAGLTIPLQITLSEFRLSGFVVLVFSKQKGITVVFRNDPLESLKVSSTFDSISFVRDYLQKAIEGQLRALFMDELPAIIHRLSLRLWVPEYRDRESESVNTLDQSSGPGQDPLASPPQDPVDASGNALNPSEVASLSLDSGVEIHSLFSQKNLLRLAALTDSQRTLSLFTPSIKDVVYRAWTASTELGDSNTLTSPASPVLSRAQSHIGSLHSFVDNASTISMQSGGSSNFSGHGLNLRSGRHPRPHGKKRKKRVVDLRRPKTTDDMESVSGESVFSSENATSAPTIFSSPAQFSEEKNDDPVTPPLAPQNDLHLPTIHERRRISQGEHTLTRRSVPSMSEVAQPSSSRNSAAMIADTWPDPDATPRNSIRLPSSDRANNPLTTAHLPSSAIQYPPPIPDNNDPRQQAWLSKMAAELARRIQEEKVGPSGSRPFPDFWDDHSREEIPPPAYGH

SEQ ID NO: 20823 - protein, 270 aa, Penicillium citrinum
WGALGHATVAYVAQHYVSPEAASWAQGILGSSSSSYLASIASWADEYRLTSAGKWSASLHFIDAEDNPPTNCNVDYERDCGSSGCSISAIANYTQRVSDSSLSSENHAEALRFLVHFIGDMTQPLHDEAYAVGGNKINVTFDGYHDNLHSDWDTYMPQKLIGGHALSDAESWAKTLVQNIESGNYTAQAIGWIKGDNISEPITTATRWASDANALVCTVVMPHGAAALQTGDLYPTYYDSVIDTIELQIAKGGYRLANWINEIHGSEIAK

SEQ ID NO: 20824 - protein, 270 aa, Penicillium sp.
WGALGHATVAYVAQHYVSPEAASWAQGILGSSSSSYLASIASWADEYRLTSAGKWSASLHFIDAEDNPPTNCNVDYERDCGSSGCSISAIANYTQRVSDSSLSSENHAEALRFLVHFIGDMTQPLHDEAYAVGGNKINVTFDGYHDNLHSDWDTYMPQKLIGGHALSDAESWAKTLVQNIESGNYTAQATGWIKGDNISEPITTATRWASDANALVCTVVMPHGAAALQTGDLYPTYYDSVIDTIELQIAKGGYRLANWINEIHGSEIAK

SEQ ID NO: 20825 - protein, 451 aa, Penicillium marneffei
MKVSSLLPSVLLLVGATRASPHPAQPPQQQPLNNIIEESNTQTNPPNKHDLEHVIDTSPLLSLHRDLVKFESISGNEADVGDFLIQYLQARDFKVEKQIVVPKGPKGQGERFNIYAYPNSTPEPRVLLSSHMDTVPPYIPYSLDLPSSNGSTTDSLNWRDNILIAGRGSVDAKASVASQILAVLEYLQLHPEAPLGLLFVVGEEVDGIGMQYFSQSELNTSPPTVHTVIFGEPTELALVSGHKGSLFFKISAKGKAAHSGYPWLGQSAVSALLPALVKLDTLADIPVEDGGIPGSEKLGKSTINIGRIDAGIASNVVPASAEASVNIRLAYHDVEKVKEIVTKAVDEATNGDENVTIEWGNKGKGHAPIDFDTDVDGFKVMTVNYATDAWYLKFHEGSGGSPEGRVHTYLYGPGSIFVAHGADEAITVRDLEDAVSGYKKLIEAAFERNKV

SEQ ID NO: 20826 - protein, 396 aa, Penicillium chrysogenum
MVVFSKVTASLACFSAVVSAAAVPVKSPRQGFSVNQVQKTVTGTRTVNLPGVYANALAKYGATVPANVHAAAVSGSAITTPEENDVEYLTPVKIGESTLNLDFDTGSADLWVFSTELSSAEQSGHDVYDVSSSGKKLTGASWSISYGDGSGASGDVYKDTVTVGGVKATGQAVEAAKKISQQFVQDKSNDGLLGLAFSSINTVSPKPQTTFFDTVKSDLDKPLFAVTLKHGAPGTYDFGYIDKKKFTGSLTYTDVDNSQGFWSFTADSYKVGTGSAGPSIEGIADTGTTLLLLDDGVVSDYYKKVDGAKNNYSAGGYVFPCDADLPDFTVTIGSYDAVVPGKHIKYAPVTTGSSSCFGGIQSNSGIGFSIFGDIFLKSQYVVFDAEGPRLGFAAQA

SEQ ID NO: 20827 - protein, 394 aa, Penicillium janthinellum
MVVFSKITVVLAGLATVASAVPTGTSRKSTFTVNQKARPVAQAKAINLPGMYASALSKYGAAVPASVKAAAESGTAVTTPEANDVEYLTPVNVGGTTLNLDFDTGSADLWVFSSELSSSESTGHSLYKPSSNATKLAGYSWSITYGDQSSASGDVYKDFVVVGGVKASPQAVEAASQISQQFVNDKNNDGLLGLAFSSINTVKPKSQTTFFDTVKGQLDSPLFAVTLKHNAPGTYDFGFVDKNKYTGSLTYAQVDSSQGFWSFTADGYKIGSKSGGSIQGIADTGTTLLLLPDNVVSDYYGQVSGAQQDSSAGGYTVPCSAQLPDFTVTIGSYNAVVPGSLINYAPLQSGSSTCFGGIQSNSGLGFSIFGDIFLKSQYVVFDANGPRLGFAPQA

SEQ ID NO: 20828 - protein, 397 aa, Penicillium roqueforti
MVVFSQVTVALTCFSAIASAAAVRQEPPQGFTVNQVQKAVPGTRTVNLPGLYANALVKYGATVPATVHAAAVSGSAITTPEADDVEYLTPVTIGSSTLNLDFDTGSADLWVFSSELTSSQQSGHDVYNVGSLGTKLSGASWSISYGDGSSASGDVYKDTVTVGGVKATGQAVEAAKKISSQFLQDKNNDGLLGMAFSSINTVSPTPQKTFFDTVKSSLGEPLFAVTLQGTGRPWHLRFGYIDSDKYTGTLAYADVDDSDGFWSFTADSYKIGTGAAGKSITGIADTGTTLLLLDSSIVTGLLQEGYPGSQNSSSAGGYIFPCSATLPDFTVTINGYDAVVPGKYINFAPVSTGSSSCYGGIQSNSGIGFSIFGDIFLKSQYVVFDSEGPRLGFAAQA

SEQ ID NO: 20829 - protein, 387 aa, Talaromyces stipitatus
MVNSKTVVSALALSALAAAAPAPSSTTSFSINQVAVKKPAIHPAVKYAKALAKYHAEIPSNVASAAASAQSGSATNKPTADDEEYVTPITAGSSTLHLDFDTGSADLWTYSASTRGVGSHSTYDTSTGKKVSGASWQISYGDGSSASGVVYKDKVVVGGVTASSQAVEVATQVSSEFSQDTSNDGLLGLAFSSINTVSPTPQKTFYDNVKSSLAKPVFAVTLKHQAPGTYDFGFIDKSKYKGSLAYTNVDNSQGFWQFTADGYSIGGSGGGSSFSAIADTGTTLVLLDDSIVDEYYSQVQGAQNDSSQGGYVFDCSADLPDFGVQIGDYTAVIPGKYINYASTGSTCFGGIQSNSGIGFSILGDVFLKSQYVVFDGDNLQLGFAAQA

SEQ ID NO: 20830 - protein, 394 aa, Penicillium janthinellum
MVSFTQLQLAFLGLSALGAAVPVTGTSEKKTFSLNQVKVAGTKTKNPAEHYANALRKYGAEVPSHVLAAAAATGSVTTSPTEFDSEYLTPIDVGGTTMNLDIDTGSSDLWVFSKELPSSETSGHAVYSPSSQSQLLNGYSWSISYGDGSSASGNVYLDYVTVGGVTASSQAVEAAETISSEFQQDPSDGLMGLAFSSINTVQPESQSTFFDNVQSNLASPVFCADLKYEAPGVYDFGFIDSSKHTGSVTYTPVDNSQGFWGFTASGYAVGSGSTVSTSISGIADTGTTLLLLPSSIVKKYYAQVKGSSNSATYGGYVFPCSATLPKFTVVINGYKAVIAAQYLNYSPVETGSSTCFGGIQSDTGIGFSIFGDIFLKSQYVVFDASGPRLGFAPQ

SEQ ID NO: 20831 - protein, 370 aa, Penicillium olsonii
MRTSILSMLALGAAAVSAAPAAAAAPAELVERGSSCTFTSASAAKAGKKSCSSIVLDNIKVPAGETLDLSNLKSGTKVTFKGETTFGYKEWKGPLIRFSGKNIEVNGASGHVINGGGASWWDGKGTNGGKTKPKFFYAHSLDDSTITGLNVKNTPVQGFSVQADNLVLDHITIDNTDGDKTNGGHNTDAFDVGESTYITISNANIKNQDDCLAINSGENIIFTGGTCSGGHGLSIGSVGGRDDNTVKNVTISDSTVSNSDNGIRIKTIYKAKGEVADVTFSNIELSNIAKYGIVIEQDYENGSPTGKPTTGVPITGLTVEKVTGSVKSSGTDVYILCGSGSCSDWTWSGNKVSGGKTSSKCKNVPSGASC

SEQ ID NO: 20832 - protein, 380 aa, Penicillium olsonii
MIAGSKLLMLGLFGALAVHALPEPAKAQVTAAPKLEERATSCTFSGSAGASSASKSKTACATIVLSAVAVPSGTTLDLTGLNDGTTVIFEGETTFGYKEWSGPLVSVSGTDITVKGASGATLNGDGSRWWDGKGSNGGKTKPKFFYAHKMFSSTISDIHIVNSPVQVFSINGATDLTLSGITVDNRDGDTDEGGHNTDAFDVGSSTGITITGATVYNQDDCLAVNSGTDITFTGGLCSGGHGLSIGSVGGRSNNDVANVIIENSQIQDSTNGVRIKTVYEATGSVKNVTYKDITLSGITKYGIVIEQDYENGSPTGTPTDGVPITDLTLDGVKGTVASSGTNVYILCAEGACSDWTWDGVSVSGGKTSSACENVPSSASC

SEQ ID NO: 20833 - protein, 367 aa, Penicillium digitatum
MRTSFVTMLALGAAAVSAAPAAPVTDLVERGSSCTFTTAEAAKAGKGSCSTIVLDNIKVPAGETLDLTKLKSGTQVVFKGETSFGYKEWTGPLVSFSGSNIHVSGAAGHVINGGGPSWWDGKGTNGGKKKPKFFYAHHLDDSTISGLNVKNTPVQGFSILADRLTLDHITIDNSEGDAKGGHNTDAFDVGSSTFITISNANIKNQDDCLAINSGSNIKFVGGTCSGGHGISIGSVGLRDNNIVKDVTISDSTVINSDNGVRVKTIYQATGAVSGVTFSNIKLSNIAKYGIVIEQDYENGSPTGKPTNGVPISELTIENVTGTLKSSATEVYILCGNGSCKNWKWAGNSLSGGKKSGKCGNVPAGASC

SEQ ID NO: 20834 - protein, 378 aa, Penicillium expansum
MILTRSVVLGFLGSASLALASPVAELAEGSRLTPRGSACSYSGTSGAAAAIAGKAGCSSITLNNVVVPAGTTLDLTGLASGTKVIFEGTTTFGYKQWAGPLISISGTNIQVSGASGHLIDGQGSRWWDGEGSNSKTNIKPKFFFAHSLKGSSTITGLNIKDSPVQVFSISGSSGLTISGVTIDNKNGDTNSLGHNTDGFDIGDSDSITITGATVYNQDDCLAINSGTNIVFSGGYCSGGHGLSIGSVGGRSNNVVETVHISSTQVVNSQNGVRVKAVSGATGTIKGVTFQDITLSGITSQGITIRQEYTNSGYTGSPTTGVPITGLTLNNVHGTVTSKGTDITIECGSSASCSGWTWTKVAVSGGKADVCKNAPSGTC

SEQ ID NO: 20835 - protein, 376 aa, Penicillium griseoroseum
MASSLKLGLIALLGATAVNAAPAAEPVLGTSLLTSRASCTFSGSSGAAEAIKSKTSCSTITLSNVEVPAGTTLDLTGLKSGTTVIFEGTTTFGYKEWEGPLVSVSGTSITVQGASGAQLNGDGARWWDGKGTNGGKTKPKFFYAHSLTNSKIENIYIKNSPVQVFSINGAKELTLSGITVDTADGDSNGGHNTDAFDVGSSNGVYITSPIVHNQDDCLAVNSGTNVHFTGAQCTGGHGISIGSVGGRSDNTVDGVTVESCTIKDSDNGVRIKTVYGATGTVQGVTYKDITLSGIAKYGIVIEQDYENGSPTGTPTSGVPITDLTLDNVHGTVASSGVDTYILCASGACSDWSWSGVSITGGQTSKKCKGIPSGASC

SEQ ID NO: 20836 - protein, 371 aa, Penicillium janthinellum
MPSYLRNLVWATLAAGLVSAAPTPSRVSDLTKKSSSTCTFSSAASASASKSSCSTIVLSNIEVPAGKTLDLTDLKDGTKVIFEGTTTFGYKEWSGPLIKISGSDITVEAADGAVINADGSRWWDGEGTNGGKTKPKFFYAHSLDDSTISGLNIKNTPVQAFSIQSDNLIIDGVTIDNSDGDENGGHNTDGFDISESTGVTIRNAVVKNQDDCIAINSGQNIYFTGGTCSGGHGLSIGSVGGRDDNTVKNVTITDSTVTDSANGVRIKTVYDATGSVSDVTFSDITVSGITDYGIVIEQDYENGSPTGTPTSGVPITDLTVKGITGSVESDAVEVYILCGDDACSDWTWSGVDITSGQTSSKCENVPSGASC

SEQ ID NO: 20837 - protein, 412 aa, Penicillium chrysogenum
MLTKQTLLAFVGALALATGTTTTEETPTQAEIDAARATALPYSPVSNVKGLAFDRFVNIWLENTDFEPAALDENLSKLAKEGILLTNYFAISHPSQPNYCASAGGDTFGMDNDDFLQIPSNVSTIADLFDTKHISWGEYQEDMPYAGYQGKRYPLSGPNQYVRKHNPLVLFNSVTDDAVRPRQIKNFTTFYDDLKHHSLPQHMFITPNMTNDAHDTNITVAGNWVDRFLSPLLKNEYFTKDSLVLLTFDEGDTYSYPNRVFSFLVGGAIPEHLKGTTDDTFYTHYSIVASLSANWGLPSLGRWDCGANLLKMVADKTGYVNWEVDTSNVYLNETYPGPMSTDNYSSKWAVPATKGKCSAGHGIAEVVKNTYHGLQPTYDYASPVPYDVTSGNNVGIKYHRTLVCILSCSSLS

SEQ ID NO: 20838 - protein, 612 aa, Penicillium chrysogenum
DITFAGVQRALPNAPDGYVPTSVSCPASRPTVRSAAKLSTNETSWLEVRRGKTLSALKDFFGHVKVGDYDVGAYLDKHSGNSSSLPNIGIAVSGGGWRALMNGAGAVKAFDSRTDNATATGHLGGLLQSATYISGLSGGSWLLGSIYINNFTTVDKLQTHEAGSVWQFGNSIIEGPDAGGIQLLDSAGYYKDLADAVDGKKKAGFDTTLTDIWGRALSYQMFNASNGGLSYTWSSIADTPEFQDGDYPMPFVVADGRNPGELVIGSNSTVYEFNPWEFGTFDPTIFGFVPLEYLGSKFEGGSLPSNESCIRGFDSAGFVIGTSSSLFNQFLLQINTTSLPSFIKDVFNGILFDLDKSQNDIASYDPNPFYKYNEHSSPYAAQKLLDVVDGGEDGQNVPLHPLIQPERHVDVIFAVDSSADTDYFWPNGTSLVATYERSLNSSGIANGTAFPAVPDQNTFINLGLSTRPSFFGCDSSNQTGPSPLVVYIPNAPYSYHSNISTFQLSTDDAERDNIILNGYEVATMANSTLDDNWTACVACAILSRSFERTGTTLPDICSQCFDRYCWNGTVNSTRPESYDPAFYLADNSMASVSLPTMLSTVVAAGLAMLILV

SEQ ID NO: 20839 - protein, 353 aa, Penicillium chrysogenum
MIPNITQLKTAALVMLFAGQALSGPVESRQASESIDAKFKAHGKKYLGNIADQGTLNGNPKTPAIIKANFGQLSPENSMKWDATEPSQGQFSFAGSDYFVEFAETNGKLIRGHTLVWHSQLPSWVSSITDKTTLTDVMKNHITTVMKQYKGKLYAWDVVNEIFEEDGTLRDSVFSRVLGEDFVRIAFETAREADPEAKLYINDYNLDSATSAKLQGMVSHVKKWIAAGVPIDGIGSQTHLGAGAGAAASGALNALASAGTEEVAVTELDIAGATSTDYVDVVNACLDQPKCVGITVWGVADPDSWRADESPLLFDASYNPKEAYNVSQLLSRQHAFDLYLKLGNLLLSRLHSD

SEQ ID NO: 20840 - protein, 302 aa, Penicillium simplicissimum
QASVSIDAKFKAHGKKYLGTIGDQYTLTKNTKNPAIIKADFGQLTPENSMKWDATEPNRGQFTFSGSDYLVNFAQSNGKLIRGHTLVWHSQLPGWVSSITDKNTLISVLKNHITTVMTRYKGKIYAWDVLNEIFNEDGSLRNSVFYNVIGEDYVRIAFETARSVDPNAKLYINDYNLDSAGYSKVNGMVSHVKKWLAAGIPIDGIGSQTHLGAGAGSAVAGALNALASAGTKEIAITELDIAGASSTDYVNVVNACLNQAKCVGITVWGVADPDSWRSSSSPLLFDGNYNPKAAYNAIANAL

SEQ ID NO: 20841 - protein, 369 aa, Penicillium griseoroseum
MRTSFVTMLALGAAAVSGAPASAPVTDLVERGSSSCTFTSAAAAKAGKSSCSTIVLDNIKVPAGETLDLSKLKSGTKVIFKGETTLGYKEWTGPLIRFSGDNINVSGASGHVVNGGGPSWWDGKGTNGGKKKPKFFYAHGLDNSNISGLNVKNTPVQGFSVQADHLVLDHITIDNSEGDSKGGHHTDAFDVGSSTYITISNANIKNQDDCLAINSGEHITFTGGTCSGGHGISIGSVGVRDNNIVKDVTISDSSVVNSDNGVRVKTIYKATGAVSDVTFSNIKLSNIAKYGIVIEQDYQNGSPTGKPTTGVPITGLKVEKVTGTVKSSGTDVYILCGNGSCKNWTWTGNSVTGGKKSSKCSGVPSGASC

SEQ ID NO: 20842 - protein, 308 aa, Talaromyces stipitatus
MKGSLIIGALCALGAVASPLNMRVLVTDIEVTVVTITVTETPGYTPAAATTTVPASTTSVAPTTVPVAGAANLNNEYPRPPLTSTSTSTTLVVPSSSSTTFVAPEPTTTVAAAPAPTPVEPSTTSTSTSASTSPSVAPSSAGSSYQSLILNSHNIHRSNHSAPALTWNETLAESALKLANTCDYHHDTSLGPAANYGQNIAFGIDSDKVDEIITNMMYNDEMMFYQDLYGQANPDMSKFEKWGHFSQIVWLDTTSVGCATVTCQPLAESHSSLALPFTVCNYYPAGNYGGEYADNVLQPKGNAMVVAS

SEQ ID NO: 20843 - protein, 208 aa, Penicillium marneffei
MVFLTEGIPSLSRSDLTLGLNTQMPSMKPRNIPSNFSADIHPSSFLKMISRGSNNVTVVNYSERFSVTGMTGTFSELVQYGLSLTANDTESHQDLKLRKRQVVAAIAPAIVPAKDLYDVPYPEQSKGLTKYAPMGKRPATTITAKSGPPQFPTSAYSIARTFLPVPTWQTTLTASRTWTDSLIENPATPAPHPKNDMQKFLKRWADDE

SEQ ID NO: 20844 - protein, 529 aa, Penicillium chrysogenum
MASTLSFKIYKNALLLAAFLGAAQAQQVGTSTAEVHPSLTWQKCTAGGSCTSQSGKVVIDSNWRWVHNTGGYTNCYTGNDWDRTLCPDDVTCATNCALDGADYKGTYGVTASGSSLRLNFVTQASQKNIGSRLYLMADDSKYEMFQLLNQEFTFDVDVSNLPCGLNGALYFVAMDEDGGMARYPTNKAGAKYGTGYCDAQCPRDLKFINGQANVEGWEPSSSDVNGGTGNYGSCCAEMDIWEANSISTAFTPHPCDDPAQTRCTGDSCGGTYSSDRYGGTCDPDGCDFNPYRMGNQSFYGPSKIVDTESPFTVVTQFITNDGTSTGTLSEIKRFYVQNGKVIPQSVSTISAVTGNSITDSFCSAQKTAFKDTDVFAKHGGMAGMGAGLAEGMVLVMSLWDDHAANMLWLDSTYPTSASSTTPGAARGSCDISSGEPSDVEANHSNAYVVYSNIKVGPLGSTFGSTDSGSGTTTTKVTTTTATKTTTTTGPSTTGAAHYAQCGGQNWTGPTTCASPYTCQRQGDYYSQCL

SEQ ID NO: 20845 - protein, 529 aa, Penicillium purpurogenum
MSALNSFNMYKSALVLGSLLATAGAQQIGTYNAEIHPSLSWSTCKSGGSCTTNAGSITLDANWRWVHGINTTNNCYTNNTWNTAICDTDASCAQDCALDGADYVNTYGITTSGNSLRLNLVTGSNVGSRTYLMADNTHYEIFDLLNQEFTFTVDVSNLPCGLSGALYFVAMDADGGVSKYPNNKAGAEYGVGYCDSQCPRDLKFIGGQANIEGWIPSTNNSNTGIGNHGSCCAELDIWEANSISEALTPHPCDTPAQTICTTDACGGTYSTDRYAGTCDPDGCDFNPYRLGVTDFYGSGKTVDTTKPFTVVTQFVTDDGTSSGSLSEIRRYYVQNGVVIPQPSSKISGISGNVIDSDFCAAELSTFGETTSFTDHGGLSKMGSALETGMVLVMSLWDDYSVDMLWLDSTYPTNETGTPGAARGSCPTTSGDPKTVEAQSGSSYVIYSDIKVGPFNSTFSGTGPTTGTTTTTTTKTSSTSSTSTTSSSTSTGTGVAAQYAQCGGQGWTGPTTCASGYTCTVLNAYYSQCL

SEQ ID NO: 20846 - protein, 495 aa, Penicillium purpurogenum
MATRSFTFAAITALLHQAAAQQAPTPDNLASLPTWKCTTSGGCIQQSTSIVVDWVYHWIHTVNGTSCTTSSGLDPTLCGTEEECYTNCEISPATYDSLGIQTSRDALTLNQYITSDGTTTNASPRVYLLDPASEDYEMLQLLGQEISFDVDVSNLPCGENGALHLSEMDATGGRSQYNPAGASYGSGYCDAQCGTSTWFNGSVNSNDLGSCCNEMDLWEANSEATALTPHPCSVDGPYGCTGDACGSTGVCDKNGCGFNPYALGDQSYYGPGLTVDTSKPFTVTTQFVTSDNTTTGTLTEICRSYIQNGKVIANAVASSSSGFSGASSITESFCTTMDSEAGTLGGLPTMGEALGRGMVLIFSLWNDASGYMNWLDSGSSGPCSSTAGIPSTIEANDPGTSVTFSNIKWGDIGSTGSGTGGSSSSSSSSSSVSPKTTSTTTTSATTKTSATTTTTSTGATQTHYGQCGGMYYTGITACASPYTCQVQNAYYSQCL

SEQ ID NO: 20847 - protein, 410 aa, Penicillium decumbens
MVHLSATSLLLAAGILPNLALGAGLNDAAKAIGQVYFGSATDNPELSDSAYVKQLSNTADFGQITPGNSQKWDATEPSRNVFTFSGGDTVAKLAQSNGQKLRCHNLVWHSQLPSWVTNGNFNNATLISIMKNHITNLVQHYKGQCYAWDVVNEALNEDGSYRQSVWYNTIGPAYLPIAFATAASVDPTVKLYYNDYNIEYSGAKAAGARRIVELVQSYGAKIDGVGLQAHFIVGSTPSKDDQKKVMAGYTAYGVEVAITELDIRMNLPSTNAQLTQQATDYSNTVSACVETKNCVGITIWDWTDKYSWVPSTFSGQGAACPWDSNFQKKPAYNAILNALNAGSSTGGGSPTTTTTTTAAATTTTAPGGSGSTGGMAQHWGQCGGNGWTGPTTCASPYTCQASNPWYSQCL

SEQ ID NO: 20848 - protein, 411 aa, Penicillium decumbens
MRSSHKRNLAALLSISGAAVAQQTAWGQCGGQGWSGATSCVSGYTCSYTNDWYSQCVPGSSGGGGSNPTTTTTMIRTTTTASSSGPTGGAGGGKVRFAGVNIAGFDFGVVISGTQDMTQIVDESVDGVNQMRHFVNDDGFNIFRLPSGWQFLVNNNLGGSLDSNNFAKYDKLVQGCLSLGAYCIVDVHNYARWNGGVIGQGGPTDDQFTSLWTQLATHYKSESKIIFGVMNEPHDLDINRWATTVQKAVTAIRKAGATSQMILLPGTDFTSAANFVENGSGAALSAVTNLDGSTTNLIFDVHKYLDSDNSGTHAECVTNNADAFNSLAQWLRTNKRQAMLTETGGGNVQSCGTYMCQQLDVLNQNSDVYLGWTSWSAGGFQVSWNYVLGEVPTNNVDTYLVKQCFVPKWKN

SEQ ID NO: 20849 - protein, 477 aa, Penicillium decumbens
MSFTRRQFLAAALGLLPLAQAQQPAVANPANPSLKTYKCSKSGGCVAQDTSVVLDWNYHWIHTANGYDSCTTSSGVDPTLCPDATTCSKNCVIEPANYTSSGVATSGDSLTLHQYVKSDGTYNNASPRVYLLGPDGDYVLMKLLGQELTFDVDLSTLPCGENGALYLSEMSGSGGRNANNKGGAAYGSGYCDAQCPLETWKNGTLVPGGQAYCCNEMDILEGNSAANSYTPHPCSSDDCDKGGCGFNPYAQGKTNYWAPGGTVDTSKPFTINTQFITNDGTTTGTLTEIRRQYIQNGKVIANAKSSAGVDSIKEAWCESVDGAAATFGGLTTMGKALGRGMVLIFSIWNDVSGNMNWLDSGSNGPCSSTEGNPTNIIAQNPDTHVVFSNIRWGDIGSTFNAPGGSGSSSSTTTSKATTTVATTKATSTTTKISTTTTAGGATQTQWGQCGGQGYTGPTACVSGTTCKAQNPYYSQCL

SEQ ID NO: 20850 - protein, 310 aa, Penicillium decumbens
MISLSSVAIALTTVVGALALPSDQSVNLAARQAITSSQTGTNNGYYYSFWTNGAGSVSYSNGAAGQFSVNWANQGGGDFTCGKGWNPGKAQDISFSGTFTPNGNAYLSIYGWTTGPLVEYYILENFGSYNPGNGMTHVGTLTSDGSDYDIYKHTQVNQPSIVGTSTFDQYWSIRKNKRSSGTVTTANHFSAWASHGMNLGSHNYQILSVEGYQSSGSASMTVSAGSSSSGGSGSGSGSGSGSGSGSGSQTTTAGSSTGTGTGSGSGSGSGGSGGNCAAQWGQCGGQGWNGPTCCSSGTCKASNQWYSQCL

SEQ ID NO: 20851 - protein, 266 aa, Penicillium decumbens
MKGKVAFLLLDLLASAAAYKATTTRYYDGQEGACGCGSSSGLFPWQLGIGNGVYTAAGSQALFDTAGADWCGAGCGKCYKLTSTGEPPCKDCGTGGVAGQSIIVMVTNLCPYNGNQQWCPNPGSTNQYGYSYHFDIMAQNEIFGDNVVVDFEPIACPGQANSDWQSCVCYGKTETDTTPVGLTAGGGGGGSSQSSTTSQGSTTTRTTLTATTTAGSGSGSGSGSGSSSGTQSVYGQCGGSGWTGPTNCASGSKCTAQNQWYSQCLP

SEQ ID NO: 20852 - protein, 464 aa, Penicillium decumbens
MQRTSAWALLLLAQIATAQQTVWGQCGGIGYSGPTSCVAGSSCSTQNSYYAQCLPGSGNGGGGAATTTTTAGQTTKTTMATTTTTSTKTSAGSGGSTTTAPPASNSGNPFKGYQPYVNPYYASEVQSLAIPSLAASLAPKASAVAKVPSFVWLDTAAKVPTMGTYLADIKAKNAAGANPPIAGIFVVYDLPDRDCAALASNGEYSIANGGVANYKKYIDSIRAQLLKYPDVHTILVIEPDSLANLVTNMNVAKCSGAHDAYLECTDYALKQLNLPNVAMYLDAGHAGWLGWPANIGPAADLFASVYKNAGSPAAVRGLATNVANYNAWSISTCPSYTQGDQNCDEKRYINALAPLLRANGFDAHFIMDTSRNGVQPTKQQAWGDWCNVIGTGFGTPFTTDTGDALQDAFIWVKPGGECDGTSDTSSPRYDAHCGYSDALKPAPEAGTWFQAYFEQLLVNANPSF

SEQ ID NO: 20853 - protein, 474 aa, Penicillium decumbens
MSFTRRQFLAAALALLPLAQAQQPAVANPANPSLKTYKCSKSGGCVAQDTSVVLDWNYHWIHTANGYDSCTTSSGVDPTLCPDATTCSKNCVIEPANYTSSGVATSGDSLTLHQYVKSDGTYNNASPRVYLLGPDGDYVLMKLLGQELTFDVDLSTLPCGENGALYLSEMSGSGGRNANNKGGAAYGSGYCDAQCPLETWKNGTLVPGGQAYCCNEMDILEGNSAANSYTPHPCSSDDCDKGGCGFNPYAQGKTNYWAPGGTVDTSKPFTINTQFITNDGTTTGTLTEIRRQYIQNGKVIANAKSSAGVDSIKEAWCESVDGAAATFGGLTTMGKALGRGMVLIFSIWNDVSGNMNWLDSGSNGPCSSTEGSPTNLIAQNPDTHVVFSNIRWGDIGSTFNAPGGSGSSSSTTTTTTVATTKATSTTTKISTTTTAGGATQTQWGQCGGQGYTGPTACVSGTTCKAQNPYYSQCL

SEQ ID NO: 20854 - protein, 499 aa, Penicillium decumbens
MAQLSFLTLAVLGLSGTVAAQSACASAWAQCGGSNFNGPTCCVSGSSCSVLNPYYSQCVPGTQVPGSGSGSSSTRSSSTTTAGGTGPSTTATAGGGAAGTSKYTTSTSFPAATATQPAYPSADPSSCGAWTLVDNVCCPEYCLSNNKSESCTSSCSGGCGTPPSSMCKSGTMWGEQLEVGTDEDWHYSRSTHFGLTSGGACGFGLYGPCTKGSKTASWTDPMLGSTCDAFCTAYPLLCKDPSDVTLRGNFAAPNGDYYTQFWPSLIGALPGSPDNYLSCGECFELIRTRADGTEYQVGDSGYTDPIYLEVVDSCPCSANSKWCCGSGADHCGEIDFKYGCPLPEGSHHMDLSDIAMGRLQGNGSLTDGVIPIRYRRVPCPKPGNAYVWLRDGGSEYYFALSVVNTNGVGSITTVEVKGKGSNSWVALKRDPNYTSSRPQERYGAWVIPQGKGPFSLPVGIRVTSPDGQQIVNENAITSFTAPAGSVEGFYYIDLGVQFT

SEQ ID NO: 20855 - protein, 546 aa, Penicillium decumbens
MKGSISYQIYKGALLLSSLLASVSAQGAGTLTAESHPALTWQKCSAGGSCTPVSGSVVIDANWRWVHDKNGKNCYTGNTWDATLCPDDKTCAANCAVDGASYASTYGVTTSGNSLRINFVTQASQKNIGSRLYLLENDTTYQKFNLLNQEFTFDVDVSNLPCGLNGALYFVDMDADGGMAKYPTNKAGAKYGTGYCDSQCPRDLKFINGIANVEGWTPSSNDPNSGVGGHGTCCAEMDIWEANSISEALTPHPCDTPGQTMCEGNACGGTYSNDRYAGTCDPDGCDFNPYRQGVTNFYGPGMTVDTKSPFTVVTQFLTDDGTSTGTLSEIKRFYVQNGKVIGQPQSTVAGVSGNSITDSFCKAQKAAFGDTDDFTKHGALAGMGAAFEEGMVLVMSLWDDHNSNMLWLDSTYPTTASSTTLGAKRGSCDISSGAPNDVESQNANSYVVFSNIKAGPIGSTFNSGSTGGGNGSGSTTTTKGSTTTTKAPTTTTTTTSKATTTTAASGGNGGGAAHWAQCGGVGYTGPTTCASPYTCTKQNEYYSQCL

SEQ ID NO: 20856 - protein, 397 aa, Penicillium citrinum
MGFLKVLATSLATLAVVDAGTLLTASNTDAVIPSSYIVVMNDDVSTAEFNTHREWATNVHARLSRRKNGETGPGKHFEINGLKGYTASFDESTAKDIANDPAVKYIEPDMIVNATANVVQSNVPSWGLARISSKRTGTTSYTYDSTAGEGVVFYGVDTGIDISHSDFGGRAKWGTNVVDNDNTDGNGHGTHTASTAAGSKYGVAKKATLVAVKVLGADGSGTNSGVISGMDWAVKDAKSRGANGKYVMNMSLGGEFSKAVNDAAANVVKSGIFLSVAAGNEAENASNSSPASAAEVCTIAASTSTDGSASFTNFGSVVDLYAPGQSITAAYPGGGSKTLSGTSMAAPHVAGVAAYLMALEGVSAGNACARIVQLATSSISRAPSGTTSKLLYNGINV

SEQ ID NO: 20857 - protein, 376 aa, Penicillium griseoroseum
MASSLKLGLIALLGATAVNAAPAAEPVLGTSLLTSRASCTFSGSSGAAEAIKSKTSCSTITLSNVEVPAGTTLDLTGLKSGTTVIFEGTTTFGYKEWEGPLVSVSGTSITVQGASGAQLNGDGARWWDGKGTNGGKTKPKFFYAHSLTNSKIENIYIKNSPVQVFSINGAKELTLSGITVDTADGDSNGGHNTDAFDVGSSNGVYITSPIVHNQDDCLAVNSGTNVHFTGAQCTGGHGISIGSVGGRSDNTVDGVTVESCTIKDSDNGVRIKTVYGATGAVQGVTYKDITLSGIAKYGIVIEQDYENGSPTGTPTSGVPITDLTLDNVHGTVASSGVDTYILCASGACSDWSWSGVSITGGQTSKKCKGIPSGASC

SEQ ID NO: 20858 - protein, 421 aa, Penicillium brasilianum
MKYPLLLATSAALALAGPQGFSKRASSFVWFGTSESGAEFGNQNIPGVLGTDYIWPDTSAIQTLRNAGMNIFRVAFLMERLVPTTLTSTPDSTYLQDLKSVLDYITSTGAYAIVDPHNFGRYYGNIINSTSDFAAFWTTVAKQFASNDKVIFDTNNEFNTEDQTLVLNLNQAAINAIRAAGATSQYIFVEGNSWSGAWTWTSVNTNLVSLTDPNNKIVYEMHQYLDSDGSGTSDTCVSSTIGQERVQSATEWLKSNGKLGFLGEFAGGANSVCQSAVTGMLDYMQANSDVWLGASWWAAGPWWGTYIYSIEPPSGTAYSYYLNILSAYFPSSSGSSTTTTTSTTTRSTSTSTTVSTTKSTSTTTSATKSTSTTTSTTSTGSTATATASHWAQCGGIGWTGATTCASPYTCQVQNAYYSQCL

SEQ ID NO: 20859 - protein, 477 aa, Penicillium oxalicum
MSFTRRQCLAAALALLPLAQDQQPAVANPANPSLKTYKCSKSGGCVAQDTSVVLDWNYHWIHTANGYDSCTISSGVYPTLCPDATTCSTNCVIEPANYTSSGVATSGDSLTLYQYVKSDGTYNNASPRVYLLGPDGDYVLMKLLGQELTFDVDLSTLPCGENGALYLSEMSGSGGRNANNKGGAAYGSGYCDAQCPLETWKNGTLVPGGQAYCCNEMDILEGNSAANSYTPHPCSSDDCDKGGCGFNPYAQGKTNYWAPGGTVDTSKPFTINTQFITNDGTTTGTLTEIRRQYIQNGKIIANAKSSAGVDSIKEAWCESVDGAATTFGGLTTMGKALGRGMVLIFSIWNDVSGNMNWLDSGSNGPCSSTEGNPTNIIAQNPDTHVVFSNIRWGDIGSTFNAHGGSGSSSSTTTSKATTTVATTKATSTSTKISTTTTAGGATKTQWGQCGGQGYTGPTACVSGTTCKAQNPYYSQCL

SEQ ID NO: 20860 - protein, 499 aa, Penicillium oxalicum
MAQLSFLTLAVLGLSGTVAAQSSCASAWAQCGGSNFNGPTCCVSGSSCSVLNPYYSQCVPGTQVPGSGSGSSSTRSSSTTTAGGTGPSTTATAGGGAAGTSKYTTSTSFPAATATQPAYPSADPSSCGAWTLVDNVCCPEYCLSNNKSESCTSSCSGGCGTPPSSMCKSGTMWGEQLEVGTDEDWHYSRSTHFGLTSGGACGFGLYGLCTKGSKTASWTDPMLGSTCDAFCTAYPLLCKDPSDVNLRGNFAAPNGDYYTQFWPSLIGALPGSPDNYLSCGECFELIRTRADGTEYQVGDSGYTDPIYLEVVDSCPCSANSKWCCGSGADHCGEIDFKYGCPLPEGSHHMDLSDIAMGRLQGNGSLTDGVIPIRYRRVPCPKPGNAYVWLRDGGSEYYFALSVVNTNGVGSITTVEVKGKGSNSWVALKRDPNYTSSRPQERYGAWVVPQGKGPFSLPVGIRVTSPDGQQIVNENAITSFTAPAGSVEGFYYIDLGVQFT

SEQ ID NO: 20861 - protein, 545 aa, Penicillium oxalicum
MKGSISYQIYKGALLLSSLLASVSAQGAGTLTAESHPALTWQKCSAGGSCTPVSGSVVIDANWRWVHDKNGKNCYTGNTWDATLCPDDKTCAANCAVDGASYASTYGVTTSGNSLRINFVTQASQKNIGSRLYLLENDTTYQKFNLLNQEFTFDVDVSNLPCGLNGALYFVDMDADGGMAKYPTNKAGAKYGTGYCDSQCPRDLKFINGIANVEGWTPSSNDPNSGVGGHGTCCAEMDIWEANSISEALTPHPCDTPGQTMCEGNACGGTYSNDRYAGTCDPDGCDFNLYRQGVTNFYGPGMTVDTKSPFTVVTQFLTDDGTSTGTLSEIKRFYVQNGKVIGQPQSTVAGVSGNSITDSFCKAQKAAFGDTDDFTKHGALAGMGAAFEEGMVLVMSLWDDHNSNMLWLDSTYPTTASSTTLGAKRGSCDISSGAPNDVESQNANSYVVFSNIKAGPIGSTFNSGSTGGGNGSGSTTTTKGSTTTTKAPTTTTTTSKATTTTAASGGNGGGAAHWAQCGGVGYTGPTTCASPYTCTKQNEYYSQCL

SEQ ID NO: 20862 - protein, 310 aa, Penicillium oxalicum; identical to SEQ ID NO: 20850

SEQ ID NO: 20863 - protein, 151 aa, Penicillium oxalicum
MSLWDDHNSNMLWLDSTYPTTASSTTLGAKRGSCDISSGAPNDVESQNANSYVVFSNIKAGPIGSTFDSGSTGGGNGSGSTTTTKGSTTTTKAPTTTTTTSKATTTTAASGGNGGGAAHWAQCGGVGYTGPTTCASPYTCTKQNEYYSQCL

SEQ ID NO: 20864 - protein, 546 aa, Penicillium oxalicum; identical to SEQ ID NO: 20855

SEQ ID NO: 20865 - protein, 477 aa, Penicillium oxalicum
MSFTRRQFLAAALALLPLAQAQQPAVANPANPSLKTYKCSKSGGCVAQDTSVVLDWNYHWIHTANGYDSCTISSGVDPTLCPDATTCSKNCVIEPANYTSSGVATSGDSLTLHQYVKSDGTYNNASPRVYLLGPDGDYVLMKLLGQELTFDVDLSTLPCGENGALYLSEMSGSGGRNANNKGGAAYGSGYCDAQCPLETWKNGTLVPGGQAYCCNEMDILEGNSAANSYTPHPCSSDDCDKGGCGFNPYAQGKTNYWAPGGTVDTSKPFTINTQFITNDGTTTGTLTEIRRQYIQNGKIIANAKSSAGVDSIKEAWCESVDGAAATFGGLTTMGKALGRGMVLIFSIWNDVSGNMNWLDSGSNGPCSSTEGNPTNIIAQNPDTHVVFSNIRWGDIGSTFNAPGGSGSSSSTTTSKATTTVATTKATSTTTKISTTTTAGGATQTQWGQCGGQGYTGPTACVSGTTCKAQNPYYSQCL

SEQ ID NO: 20866 - protein, 407 aa, Penicillium marneffei
MTAVKSLLLALAVGQIAQAQLDTAAKAAGLLYFGTAVDNPDLSDSQYLATLQTADFGQITPANGMKWQPTEPTQGTYTFSDGDQIASLAKSNNDYLRCHTLAWYNQLPSYITSGSWTNQTLIAALQEHIKGVVTHYKGQCYAWDVVNEALNEDGTYRQNVFYQHIGEAYIPIAFAAAAAADPNAKLYYNDYNIEYAGAKATGAQGIVKLVKAAGGRIDGVGFQSHFIVGQTPSLAAQKANLASFTALGVDVAITELDIRMTLPDTSALQAQQSTDYQTTTTACVQTKGCVGITIWDFTDKYSWVPGTFSGQGDACPWDSNYNKKPAYYGILAGLKSGSGSPSSSSTLITTTKPTTTSTAPPTTTTSSSPSTGAAHWGQCGGIGWNGPTTCVSPYACQVFNPYYSQCL

SEQ ID NO: 20867 - protein, 844 aa, Penicillium marneffei
MRALPFLLLTSLFGHALAEDGLNGWLRYAPLPASLASHFPHDFPSSIVALNSSVNSPVYTAAQELQKGFQGILHKPIDIVNSTKDHSHSSSIVVGTADAYTEAFGTGTNWGDLIEDGFWLHTSKDSVQIIGQNERGALYGTFEYLSMLAQGNFSDVAYTSNPHAHIRWVNQWDNLDGSIERGYGGASIFFKNDVVVANLTRATEYARLLASIGLNAVVVNNVNANSSLLTPENIQGLGRIADVFRPYGVQLGISLNFATPQQIGGLNTYDPLDQGVIKFWTNITDQLYKAVPDMAGYLVKADSEGQAGPLVYNRTLSQGANLFANALKPHGGILMYRAFVYNQLNESNWKADRANAAVEFFKDLDGEFEDNVIVQIKYGPIDFQVREPASPLFANLLNTNTAIELQIAQEYLGQQCHLVYLPPLWKTILDFDLRVESKQSRVSDIVSGERFNRSLGGFAGVVNVGTNTTWLGSHLAMSNLYAYGQLAWNPARDPADIIQDWTRLTFELDQHVVDTITEMSMESWPAYESYSGNLGIQTLTDILYTHFGPNPASQDNNGWGQWTRADHTSIGMDRTVSNGTGYSGQYPPEISSMYENIETTPDDLLLWFHHVPYTQKLQSGKTVIQHFYDAHYTGAATAQTFPTKWESLKNRIDKERYNHVLYRLAYQAGHSIVWRDAISEFYHNLSAIPDEAGRVGTKNHPWRIEAENMDLTGYIPYTVNPFETASNATAIVTASNTTAGTASTRINFQTGKYDIAVNYYDVTGGVSHWKLFINDKQIGEWDGDHEFTLGHAPSVHLDGHSASRVTFRGISVKKGDLLKIWGQPDGIEQAALDYVVFLPKGVVD

SEQ ID NO: 20868 - protein, 833 aa, Penicillium marneffei
MLPDENGIDGWLRYAPLPSEFASQFKQHRSIIALSNDDSSPVLTAAKEVQDGLNKILKQEVKISHNFVPNRQTEDAATIVIGTIHEFSQAGGDVTHIPPLKEDGFWLDEDKNGNVQILGQNERGALYGAFEFLMLLAQGRPCPSSHISNPSAPIRWVNQWDNLDGSIERGYAGPSIFFKDIVVQEDLTRVSQYARLMASVGLNGIIVNNVNSHHDLLSPINLEGLGRIANAMRPWGVRIGVALFFDTPKTLAGLPTSDPLDPEVIAFWDRITAQLYQHVPDLIGYLIKANSEGQPGPLTYGRTLAEGANLFAAALKRHGDGVLIYRAFVYNHHLDESNWKNDRANAAVEYFKDMDTLFADNVLVQIKYGPIDFQVREPTSPLFAHLRRTPAIIEFQVAQEYLGQQSHVCYLPPLWKTILDFDLRIDGEPSPVHKILSGERFDWKRSGYAAVVNVGSDSTWLGSHLAMSNLYAYGRYAWDPISDAENVIRDWTRLTFAINPTVVDTVTSISMESWPTYENYTGNLGIQTLCEITKTCHYGPRPDSMDGNGWGQWTRADAHAIGMDRTVATGTGYARQYPAEIAQLYEKIESTPDELLLWFHHVPYTQRLKSGKTVIQHFYDAHYEGAANAQTFAPRWEALRGLVDQARFEHVLFRLKYQAGHSLVWRDSVNNFYMDKCGIADEHGRVGHYPWRIEAESMDLTGYTVVPITPFEAASGGKAIITTSNDQPGSAKCKVPFKTGVYNVAVNYYDHLGGTSKYKLLVGGRLIGEWVGDLGTILLHDFSDLRDGHSATRINFDSVQVTKGDLLEIIGTPDGTELAPVDYVSFLPRGIID

SEQ ID NO: 20869 - protein, 446 aa, Penicillium marneffei
MSITIWQYFRNQAAMKTTILLASAILGHSVSAQIVGAYGQCGGVNYSGSTACVSGYVCIFLNPYYSQCVPGTATTTTSSTLTTTTSKTTSSTSKTTTTSAPTSTGFSKVNGLNFTIDGKTNYFVGTNTYWLAFLNNKSDVDLVLSDIAASGMKILRVWGFNDVNTVPSPGTVYFQLLANGTATINTGADGLEKLDYVVSSAEAHGIKLIIPFVNNWSDYGGMAAYVTAFGGSQTTWYTNTAAQVAYQAYIKAVVSRYRTSPAIFAWELGNEPRCKGCNTSVLTDWAKTTSAYIKSLDANHMVTTGIEGFGLDAGSDGSYPYTYSEGTNFTALLSIPDIDFGTIHLYPNSWGEALSWGSSWVSTHGAACASIGKPCILEEFGATSDQCANEAPWQATSLNTKGIGADMFWQYGDTLSTGQSPNDGNTIYYGTNTFTCIVTNHVAAIR

SEQ ID NO: 20870 - protein, 397 aa, Penicillium marneffei
MQISTALISLGLLASSVVAAPHRLKARAPGGEVVVYWGQNAAAASENNDLSTYCTSSSGIDIVVLAFLYEYGNGITIPSGVIGQDCSISTSGQGSNCGNLARQISTCQSHGVKVILSLGGAVGAYSLTSQAEAETIGQHLWDAYGNTSGGSIPRPFGSVFVNGWDFDIEASSGNQYYQYMISKLRSNFASDSAHTYYITGAPQCPVPEPNMGQIITAAQFDYLWIQFYNNPYCSYPNTLNYHDWVSYVSGTPSAHAKLFLGVPASELGSTGTQSGAVYYQSPSVLASTVASFDTSSNWGGIMMWDAAFSDANMVNGCTYAQQASSILKTGSPCGGTGTTPPPPTTTSTSPTTSPTSPATGTPVAQWGQCGGQGYTGSTVCASPYHCVTESIWWASCQ

SEQ ID NO: 20871 - protein, 395 aa, Penicillium marneffei
MKPTTTIVTSAILAATSIQAQQTGYGQCGGQNWTGATTCVSGWTCTYLNNWYSQCLPASSTLTATTSSKTSTTSTTVKTTTSVTSSPTSTGKLKWFGVDESCAEFGTAMPGTWGVDFTFANTATIGELINQGFNIFRVPFAMERMAHGSITAALDTAYLTNYSVAINYITQHGAYAVIDPHNYGRYNGNIITDTTAFQTFWSNLATAFKGNSKVIFDTNNEYHDMDETLVFNLNQAAINGIRGAGATTQYIFAEGNSWTGAWTWNTTNDSLKGLSDPENLLVYEMHQYLDSDGSGTNAACVSSTIGVERVQGATSWLKANRKLGVLGEYAGGPNSVCQAAVTGMLDHLVANNDVWLGAVFWAAGPWWPSSTWSNFEPPSGQAYVYYDQILKAYTP

SEQ ID NO: 20872 - protein, 417 aa, Penicillium marneffei
MHSLGVLVSLTLLAASALAGPINLTKRRTSTGETVVYWGQNGGGVIEATDLATYCSISSGIDIIVLAFLYQYGNGVTVPGGGFGQTCYILAGSGTAQSCSAVASAITTCQNNGVKILLSLGGASGGYSLTSQTEAKAIGDYLWQAYGNPSSITVPRPFGNAIVNGWDFDIENASGSSYYPYLIAALRSNFASDSASKYYISGAPQCPIPEPNMGSMIANSTFDMLFIQFYNNNNYTNPCALGINGDAPLNYLEWVSFISTSKSLDAKLFIGVPASTLAANGGESGSIYYATPEQLNIIVGDTRGNTSFGGVMMWSAGYSDSNVNDGCTYAQEVSKILYEGEICSGSYDVTRTLTPVAPTPSFTGTATGTSTATPTATGTPVPEWGQCGGIGYTGSTVCASGLICVYVSPYWSSCQAK

SEQ ID NO: 20873 - protein, 434 aa, Penicillium marneffei
MRFTSTLQLLLAATTVLAVPSIDERSPSISRNKQVGPKCAFKPLPETAKRNKVCKVKTHGNGKDDSDYILAALKSCNNGGKVVFDKDYTIGTALDIQWLKHIDLDITGTIQFTNDTNYWINNAFQIVFQNSTTFFQLGGEDVNIYGGGTIDGNGQVWYDMFAVNATLQRPILMGIIGLEGGSIGPLKLRHSPSWYHIVANSSNVVFDGLDISGYSTSVHVAKNTDGWDTYRSDNIVIQNSVINNGDDCVSFKPNSTNILVQNLHCNGSHGISVGSLGQYPGEVDIVENILVYNISMFNASDGARIKVWPGINSELEASLQGGGGQGSVRNVTYDTMSIHNVDWAIELTQCYGQSNQTLCDEYPSKLTITDIHFKNFSGVTSTKKGKNIATLVCSSPNVCSDIYAENINVVSPSGYNQAICTNVDDSLLSLNCTA

SEQ ID NO: 20874 - protein, 240 aa, Penicillium marneffei
MKLGYLALLPALRYYDGQEGACGCGTSSGLDSWQLGISSGVYTAAGSQAFFDTAGATWCGAGCGKCYNLTSTGNPPCNGCGAGGAAGKSIIVMVTNLCPYNGNQQWCPEVGSTNQYGYSYHFDIMAQSEIFGDNVVVNFEPVACPGQATSDWETCVCHGQTATDVTPAGLTNGGGSGSSSATSSTYTSTTSLPSTSTSTSAGATQTVYGQCGGSGWTGATTCAAGSTCHQANQWYSQCLP

SEQ ID NO: 20875 - protein, 421 aa, Penicillium marneffei
MFLLDGCFIFHQTDGSGMSGLKCKHDLLQCAHIVSSTALPPSKTIEKRAICTPGGYGNASKDDTPAIASAIATCGKGGSIVIPSGTTYNLRSTLDFAGCFGCELQLKGTLKVSNDYQCWSDYKAIILVSDITGATITSTTGAGVIDGNGQDAYDAFAADSLLSRPTLVYIIGSSDITMSGFRVKDPPNVFFSNTGSSRNIEYASLTMIASSKSTNAPKNTDGFDVGTSTFTTIHNVYVSNQDDCITFKPGANYATVDNVTCAGTNHGVSIGSLGESGDNTVTNIYVTNLSASGCSKAAGIKLYASGPDYGTATVHNVTYQGVTVDDCDYGLQIQSCYNSNSSYCAEYPTTASLTDVYFKDFSGTTSGKHGSVVANLDCSADMTCDVYVENFSIKPPSGTAEVLCANFDGSPGVTCTPGASG

SEQ ID NO: 20876 - protein, 795 aa, Penicillium marneffei
MLGLIALSFIAYLAVTQAFPREPVPSKHIPCGHSNGCSPDPWAKLYPSPGAVVVDNSANPYPGSFSTVQAGVNALNSTATRPQSLFIFPGTYREQVYIPKLKSNLTVQGHTHNSKGYEQNTVTITYNLALINTTNDDLTATLRLWNPNTKVYNLNVVNTFGHIPKNGQNLAVSAEATGQGYYGCQLIGYQDTLLAETGLQLYAKSLIVGAVDFIFGQAALAWFENIDIRTIAAGSVTASGRSSATNPSWYVINRSNVSAINNTIPAGVNYLGRPWGSFARVVFQETYLGNIIAPPGWSQWSTSTPNIGNVTLAEFNNYGPGSALQQGSRAKFSEQLTQPISIRSILGEHFENEWWVDTAYLDNNDVTTGASTWTTTTIPTSGSTFASSSISISSSSAPSTISTAATFTSSVTFSSALTLTTVSSVSVPLISPSVTTSTPMAASSATSCICTDYSQISSAVTSCTNIVLSNIAAPNGSAIDLSGLQAGTTVTFDGSTTFGFTNSSSFNPMIISGVGITITANPGAIIDGNGQAYWDGLGSNGGVPKPDHFIVVKRVTANSVVKNLYIQNWPTHLFSISSSSDVVFQDLVLNNTAGNAPNALSSGLAAAHNSDGFDLSSSNNIVVERTLVYNQDDCVAITSGDNVTVSNVECHGGHGLSIGSVGGKSNNNVTNIRFADSSVINSQNGCRIKTNYNTTGYIANITYSNIVIRDVSIYGVDVQQDYLNGGPTGTPTNGVFIEDVLFQNVTGTATSSAQDYYVLCGDGSCSNFTFTDVAITGGSRSSSCNYPKSGCPLAS

SEQ ID NO: 20877 - protein, 244 aa, Penicillium marneffei
MRHLPFYFLLLHALFASSQDLPQTLTHPPPTPTTPHATLEQRAGTVIIVTVTVTPSTVPITPSYTNPVIFENDILNQTNYYRRQHNASTLIWNETLAAYAKQWAEPCDWKHSGGPYGENLAEGYTNVTSAIDAWAIESKEYKYSPPAGFSEKTGHFTQLIWKATTDVGCGVADCSANDDDNTRGKAVGWFLVCEYWPPGNVVGDHNEYFKDNVKPVVSLGVRLKVHGFGVWLMFGFAEAFLQLL

SEQ ID NO: 20878 - protein, 356 aa, Penicillium marneffei
MAIPLVLALAWFLPLVLAASLTQVNSFGDNPGSLQMYIYVPSTLASKPAVIVAMHPCGGSATQYYGMYDYHSPADQYGYILIYPSATRDYNCFDAYSSASLTHNGGSDSLSIVNMVKYVISTYGADPSKIYMTGSSSGAIMTNVLAGAYPDVFAAGSVFSGMPYACLYGAGAADPRMSNQTCSQGQIQHTGQQWAAFVHNGYPGYTGQYPRLQVWHGTADNVISYADLGEEVSQWSTVMGLSFTGNQTNTPLSGYTKMIYGDGSQFQAYSAAGVGHFVPTDVSAVLDWFGITGGTTTTTTKTMPSTSTTPPTTTSSTGGCAAAHWAQCGGIGYTGCTTCASPYTCQKMNDYYSQCL

SEQ ID NO: 20879 - protein, 425 aa, Penicillium marneffei
MYWLRNLLPLTICSTAFAAAASKGGVWQKGKVCNVTALGGKRDDVPNILEAFSRCGKDGTIVFPEDQNYWIATRLNPIVSNVVIDWRGVWTFSDALDYWRNHSYPITFQNHHAGFVLTGDHITIEGHGTGQIYGNGNAWYNVEQGVTQPGRPMPFVFWNVSEVLVEDFTVKDPPLWSLNIMNGTNMVFNNITCNATAVNAPYGTNWVQNTDGFDTMDANNIELNGFTYQGGDDCVAIKPRSYNVRVSNVACHGGNGIAIGSLGQYLEDASVKNVVIDNVDIIGYNKDMHNAAYIKTYMGGRVLQRSYESAGLPNGGGWGTVENILFSNFNVQGASAGPAITQDTGDNGTFKGTSLIAISNVAFVNFTGYLNGVSRAASVSCSNVHPCYNIDFQNVDLLPSQNATAYGNVTCSYIESGGVRGLSGC

SEQ ID NO: 20880 - protein, 536 aa, Penicillium marneffei
MSALNSFTMYKSAIILGSLLATAGAQQIGTLTTETHPPLTWSTCKSGGSCTSNSGSIVLDANWRWVHSVNSSTNCYTGNTWNTNICDTDASCAQDCALDGADYSGTYGITTSGNSLRLNFVTSSNVGSRTYLMADNTHYQMFDLLNQEFTFTVDVSNLPCGLNGALYFVTMDADGGISKYPNNKAGAQYGVGYCDSQCPRDLKFIAGQANIEGWAPSSKNNNTGIGNHGSCCSELDIWEANSFSEALTPHPCDTPGLTVCTGDNCGGTYSNNRYAGTCDPDGCDFNPYRLGVTDFYGSGKTIDTTKPFTVVTQFVTNDGTSTGTLSEIRRYYVQNGVVHPQPSSKISGVSGNVINSDFCAAEISTFGETASFTNHGGLPKMSAGISAGMVLVMSLWDDYDVNMLWLDSTYPTNATGTPGAARGSCATTSGDPKTLESQSGSSYVIYSDIKVGPFNSTFSGTGSTTGSTTTTTTKPSTSMSSTSTTTKTSTSTASTSTGTGVAAHWGQCGGQGWTGPTACASGFTCTVVNPYYSQCL

SEQ ID NO: 20881 - protein, 375 aa, Penicillium marneffei
MHSFIGLAGLAFFSSVVLAVPAPAVTTPATLENRATSCTFSGSNGAASASKSKTSCSTIVLSNVAVPSGTTLDLTGLNSGTKVIFEGTTTFGYKEWTGPLVSVSGTRITVEGASGAVLDGDGARWWDGQGSNGGKTKPKFFYAHNLKSSTISNIKVLNSPVQVFSINGAETLTLDSITIDNSAGDSTGAHNTDAFDVGSSNGVTISNAIVQNQDDCLAVNSGTNIIFTGGTCSGGHGLSIGSVGGRSDNTVQTVHIENSTVKNSQNGVRIKTVYGATGSVSGVTYKGITLSGITKYGIVIEQDYENGSPTGTPTTGVPITGLTIDGVTGSVTSSATDVYILCGSGSCSGWTWEGVNITGGKRSSSCKNVPSGASC

SEQ ID NO: 20882 - protein, 414 aa, Penicillium marneffei
MKSYLTIFTLAGAAIAQVSAWGQCGGIDYTGSTTCASGYSCVFVNEWYSQCQPRGSATTSSPPSTTSSMPTSTGSLAAVRYLGRVNPATNELTWPGTGLSFTFTGSSAVIDFHEVNGTNSVGLIIDGGEPTVISNVDGTSISTPAGLSQGRHTVQLRKRSEALFGTIVVGKVTTDGPSSAEKTPPRKIEFIGDSITVGYGLDGTLPCTNTAALEDNPKTYAALAANALGADYSVVAWSGIGITRNYVSTAPDPSPIMPERYTRYGANDADNSYTFPSDWTPDAVVINLGTNDFGYLAYNASGQAYDAREPLNATTYTNAMVSFVQSIQKHYANAKFFLMTSPMLSDSFPTAEDAQHTTMSKALQAAISQIGANAHLVDWPTQGSEVGCDYHPNAATHAAQGVVLTSAISTVMGW

SEQ ID NO: 20883 - protein, 461 aa, Penicillium marneffei
MLRYLSIVAATAVLTGVEAQQSVWGQCGGQGYTGATSCAAGSTCSTQNPYYAQCIPATATSTTLVKTTSSTSVGTTSAPTTTTTKATTTKASTTATTAAASGNPFSGYQLYANPYYSSEVHTLAIPSLTGTLAAAATKAAEIPSFVWLDTAAKVPTMGTYLANIEAANKAGATPPIAGIFVVYDLPDRDCAAAASNGEYTVANNGVANYKAYIDSIVAQLKAHPDVHTILIIEPDSLANMVTNLSTAKCTEAQPAYYECVNYALINLNLPNVAMYIDAGHAGWLGWSANLSPAAQLFATVYKNASSPAALRGLVTNVANYNAWSISSAPSYTSGDSNYDEQLYVNALSPLLTSNGWPNAHFIMDTSRNGVQPTQQKAWGDWCNLIGTGFGVAPTTNTGDPLEDAFVWVKPGGESDGTSNSSATRYDYHCGNSDSLQPAPEAGSWFQAYFVQLLTNANPPLV

SEQ ID NO: 20884 - protein, 303 aa, Penicillium marneffei
MKGSLFVGALCVLGAAASPLNKRVLVTDIEVTVVTVTVTETPGAATTSVPASTISVAATTNPVAAAANVNTDFPLPPWTETETETAIVVPSSTPSTPTFVAPEPTIVAPEPSITADPTTAVVETTSTSTSVTPAGTDAAYQAKILDSHNIHRSNHSAPALAWNETLAQSALALASTCDYHHDTSLGPAAGYGQNIAFGVGCDNVDQIITNMMYNEEMMYYQGLYGEANPDMTNFENWGHFSQIVWLDTTTVGCATVTCSPLAESGSSMSLPFTVCNYYPAGNYGGEYGDNVLAPLGNPMVVAP

SEQ ID NO: 20885 - protein, 288 aa, Penicillium marneffei
MLSRALALSALVGGVLSVPIVEKRACPNIHVFGARETTASPGYGSSDTVVNDVLNAYPGSTAEAIVYPACGGQSSCGGASYSSSVAQGIAAVASAVNSFHSQCPNTEIVLVGYSQGGEIMDVALCGGGDSNQGYTNTAVQLSASAVTMVKAAIFMGDPLFRAGLPYEVGTCTAGGFDERPAGFSCPSASLIQSYCDASDPYCCNGNNSATHQGYGAEYGNQALTFIKGKLSGTSNPGNGTTGGNGGSGGSGGTVAQWGQCGGQGWTGATGCVSPYTCTVINPYYSQCL

SEQ ID NO: 20886 - protein, 633 aa, Penicillium marneffei
MATVRICVCGDEGTGKSSLITSLVKGVFVTNKIQPVLPQITIPPTIGTPENVTTTTVVDTSALPQERANLAREIRKSNVILLVYSDHYSYERVALFWLPHFRSLGVNVPVVLCANKADLATDTTDAQVIDEEMLPVMAEFKEIDSCIRSSARQHRNVNEAFFLCQKAVTHPIAPLFDSKESVLKPAAVAALQRIFYLCDKDRDGFLSDKEIEDFQLKCFGKPLSEEDLVHIKETISKAYPDAVTPAGITSRGFLHLNKLYAEKGRHETVWIILRSFQYTDNLSLQETYLHPKFEVPPFSSAELSPEGYRFLVDLFLLSDKDNDGGLNDSELASLFAPTPGLPSSWTDDSFPSSTVRDEAGHVTLQGWLAQWSMTTFTSPKTTLEYLAYLGFESSDRSNPSTTAALKVTKPRKRRRRPGRVGRNVVLCHVLGAAGAGKSSLLDAFLSRGFSNTYHPTIQPRTAVNTVELPGGKQCYLILDELGELEPALLENQSKLLDQCDVIAYTYDSSDPDSFAYITKIRAKYPHLEELPSIFLALKADLDRTTQRAECQPHEYTARLGLPAPPLHVSATWSSIQEVFVHIAEAAMDPSTTFPRTEEDLESKWMSWGIALGAVVCAGAAAVAIWHRVHNSSP

SEQ ID NO: 20887 - protein, 385 aa, Penicillium marneffei
MLWAVPLLLVIPAVTAQSPLYGQCGGQGWAGATTCVSGSCCTYSNAWYSQCLPCSNGGSTTTTTSTTLKTTTTKPASTSKTVSPTSCPLPSQYKWTSSGSLANPASGYLSLKDFTHVPYNGKHLVYASNVNSGGSYGSMNFALFSDWSQMGSATQTQMSQGAVAPDLIYFAPKDVWVLGYEWCQWAFCYLTSTNPTDAKGWSSPQPLYEGTFSGTGPIDPAIIADTEKVYLFFAGDNGNIYRASMPIGNFPASFGSSAEIILTDSTYNLFEAVEVYSIQGQNLYLMIVECIGSNGRYFRSFTATSLGGTWTAQASTESNPFAGYSNSGAAWSKDISSGDLIRSSADQTKPVDPCNLQLLYQGRNPNSNDSYNDLPYRPGLLTLVH

SEQ ID NO: 20888 - protein, 498 aa, Penicillium marneffei
MMSHVATRPLALAAIAALFHQVASQQAPTPDNTVSLPTWKCTSSGGCVQQSTSIVVDWVYHWIHTVNGSTSCTTSSGLNSALCGTEKECYTNCEISPATYDGLGIRASGNALTLNQYVTSNGTTNSVSPRVYLLDPAGKNYEMLQLLGQEISFDVDVSNLPCGENGALYLSEMDATGGRSQYNPAGASYGSGYCDAQCGTGSWFNGSINTGSLGSCCNEMDLWEANSQATALTPHPCSVDGPYGCSGSACGSTGVCDKNGCGFNPYALGDHNYYGSGYTVDTSKPFTVTTQFVTSDGTKTGALTEIRRSYVQNGKVIANAVASSSSGVSGANSITESFCTTMDSEAGTLGGLRTMGEALGRGMVLIFSIWNDAGGSMNWLDSGNSGPCSSTAGVPSTIQANDPSTSVTFSNIKWGDIGSTGPSPGGSSSSSSSSSKSSSTTISITHSTTSSSATTTTTSTGATQTHWGQCGGTGYSGPTACAPPYTCKAQNPYYSQCL

SEQ ID NO: 20889 - protein, 254 aa, Penicillium marneffei
MRPSSYLSLLLLSLSSSLALTHAIPLPLEQRNTVLNEFLTALLNHLPNINVAINDATSIITNLDNLLAKLIGATTTQNQFRSGGPCAEYTLIWARGTSEPGNMGVLVGPPLVWALQDVVGTSGLTIQGVNHYSASVAGYLEGGDPSGSSNMASLISEAYSSCPNTKLIAAGYSQGCQVTHNAISQLDATTAAWIDKVLLFGDPDNGQAIPNVDSANVYTACHNGDNICDNGDLILVPHLTYAENVVAAAAFATA

SEQ ID NO: 20890 - protein, 823 aa, Penicillium marneffei
MDTAFILLLASTMPIVSAQSASWSAAYSKASASLSKLSQNDKIGMVTGIGWGKGPCVGNTAAPSGISFPSLCIQDSPLGVRYANPVTAFPAGTNAGMTWDRTLINQRGAAIGAESKGLGVHVQLGPVAGPLGKIAQGGRGWEGFATDPYLSGVAMIETITGMQSSGTQACAKHYIGNEQELNRESMSANIDDRTLHELYLWPFADAVRANVASVMCSYNQINGTFSCEDEESMTRILKTELGFPGYIMTDWNAQHTTANSANSGLDMTMPGSDYSNTPSSVFWGQNLAKAISSGQVAQSRLDDMVIRVLAAWYLVGQDQGFPAVAFNSWSGGQASVNVTSNHNQVAHAVARDSIVLLKNTNGTLPLNKPTSIAIIGTDAQTNPSGPNACTDHGCDTGTLAMGWGSGTCQFPYLTDPLTAIKSQAASDGTTITTSISDDSSAGASAAQSAEYAIVFINSDSGEGYITVEGVAGDRNNLDPWHSGNALVQAVAAVNKKTIVVIHSVGPVILETILAQPNVVAVVWAGLPGQESGSALADILYGRTAPSGKLTYTIAKQASDYGTAVVSGNDNYPEGLFVDYRHFDKSNIQPRYEFGYGLSYTTFAYTNLAVTITVSAGPTTGQTAPGGPSDLFGSVGTVTVQVANTGSVAGAEVAQLYIGLPSSAPSSPPKQLRGFEKLSLAAGASGTATFDLTRRDLSYWDVSQQKWVVPSGAFTLYVGASSRDIRLQGTFTPGGGSTTSTIISSKTSSTISTSVTSTSVATSTSITSSSTTSKTTTTSSTTSAAGPTQTAYGQCGGQGWTGPTTCPSGWTCKVSNQWYSQCLQ

SEQ ID NO: 20891 - protein, 271 aa, Penicillium marneffei
MKLVEAASLLALITLPLAAFADVEFIEPGAGSTVNSGDMLTAYWKDSGDSPSLVEFHDYDLFLCAGGPEIEYSEDLALLVPNGLFDRGNSVSFQIRPDLGPEYPDAYFLKMISRGSNNVTVVNYSERFSVTGMTGTFSELVQYGLSLTANDTESHQDLKLRKRQVVAAIAPAIVPAKDLYDVPYPEQSKGLTKYAPMGKRPATTITAKSGPPQFPTSAYSIARTFLPVPTWQTTLTASRTWTDSLIENPATPAPHPKNDMQKFLKRWADDE

SEQ ID NO: 20892 - protein, 338 aa, Penicillium marneffei
MKAFYLSLWALAGSASAYLATTTRYYDGQEGACGCGSSSGLSSWQLGISNGVYTAAGSQALFDTNDSSWCGGGCGKCYNLTSTGTSACNGCGEGGVAGESIIVMVTNLCPYNGNEVWCPSVGAKNNYGYSYHFDIMAESEVFGDNVVVNFEPVACPGQAALDWGTCVCHGQTDTDTTPAGMAAAAAAESAGTVATSSSSSSSSTSTVKTSTTLVAVPTSPVKEVASSSTSSTSTVKSIPTVVAESSPAAVVEPTSTAISTPQGAATTSTTSVTQYTTVTEIATVWVTPNPSATTCSSSAVQTLYGQCGGINWTGATTCVSGSTCKVQNPYYYQCVSSA

SEQ ID NO: 20893 - protein, 847 aa, Penicillium marneffei
MTFGVGGPSLLTVCLLATSVSSAVLQAYTWKNVKTGGGGGFTPSIVFNPSVPGVAYARTDIGGPYRLNQDDTWTPLLDSVNNSNWHNWGIDALATDPVDTKRLYLAVGMYTNDWDPNPGSILRSTDSGTTWQETVLPFKVGGNMPGRGVGERLAVDPNKNSIVYFGARSGHGLWKSTDYGVTWSNVTSFTWTGTYFQNASSSYTADPVGIAWVTFDTTSGTKGSLTPRIFVGVVDTGKSVFKSEDGGVTWAWVSGEPMYGFLPHKGILSPVEKTLYISYSNGAGPYDGTNGTVHKYNISTGVWTDISPTPMASTNYGYGGLAVDLQVPGTVMVAALNCWWPDELIWRSLDSGATWSPIWAWNGYPNLNYYYNYDISNAPWLQDNTSTAQFPVSVGWMVEALAIDPFDSNHWLYGTGATIYGGHDLLKWDSNHNVTVKSLAVGIEEMAVLGLISPPGGPPLLSAVGDDGGFYHSDLDKAPNQYFHDPTYSSTNGIDYAGNKPSYIVRSGSSSTLPTVSISTDFGLTWSADYAASSSTVPGSVAISADGDTVLLTSTTGSPLISKYSSSFSTVSGLPSSAVIASDKSNNTVFYGGHAGNFYTSTDGGVSFTKTVSLGSSAAVNTIRAHPSIAGDVWASTDTGLWHSTNSGSTFTQIGSSCTAGWSFGFGKAATTGSYPVIFGFFTIDGVTALFKTEDIGVNWQMISDATHGFGSSSANVVNGDMSNYGRVFVGTNGRGIWYGEPSGSLPSSTASGTKTSATGITSSTSSITKSTSATITTSSIKSTSSSTTRTSSVVTTTTSGTSATAAPYGQCGGSEYTGPTVCPSGWTCTFYNDYYSQCKIYHSVAL

SEQ ID NO: 20894 - protein, 289 aa, Penicillium marneffei
MVAFSTLLAAFAAFVPSLAAPAPAVPIERDVALSERGPHDFILGAENRLGRRSAINYNQDYTTGGSVNYSPSSTGFSVNWSNANDFVVGVGWQTGTTSPITFGGSFSVSGGTGLLTVYGWTTNPLVEYYVMEDYSNPPTQGTIKGTFTSDGSTYTVWENTRTNEPSIVGTATFNQYISIRSSTRTSGTVTIQNHFQEWASLGMNLGTMNYQVMAVEGWSSSGSASQSVSNTGSGSTNGTTGTGGGNGGGNGGGSVAQWGQCGGQGWTGATACVSPYKCTVINPYYSQCL

SEQ ID NO: 20895 - protein, 437 aa, Penicillium chrysogenum
MKFLAIGALLLSTVSALATEHIIKGAQIIPASDKAGLKKIGAHGHHKHHDRRTVTIRSSKSDTDDISDDFLWGIKAANHGGRLLLQKGKTYVIGKKLDLSFLDDIEVQLEGEVKFTDDIDYWQANHFYYSFQRSITFWVWGGQDIKIFGKGTLNGNGQEWYNAFAGMEILDPDNVFYRPVLFVTDNATRVSVEGITQLNSPCWTNFFVRTKDVSFDDVYINSFSTNASALPKNTDGFDSFNVDGLRVTNTRVDVGDDCFAPKPNTTNIFVQNLWCNNTHGVSMGSIGQYPGVEDIIEHAWIENVTLVNGQNGVRLKAWAGPDVGFGRINNITYKDVRVENTDSPIVLDQCYFNIDAATCAEYPSSVNFTNINFENIYGTSSGKNGKVVADLTCSPNSVCTDIHLSDIDITSPAGGPPIVTCDGIDGDVGVECQSSSA

SEQ ID NO: 20896 - protein, 425 aa, Penicillium chrysogenum
MKTLAILTLTGLVSAQAAPYAQCGGGGYSGPTTCGSGWTCQYQNDWFSQCVESTNGGTTLSTKVLTSTSKTTTTTKATASATGFPTTNGLEFEIDGKTNYFAGSNSYWIGFLTNNDDVDLVFDHMSESGLRILRVWGFNDVNTVPSSGTVYYQLLKDGTATINTGADGLQRLDYVVASAEARNVKLIINFVNNWSDYGGMAAYVTAFGGSQTSWYTNTAAQTAYRAYIKAVVSRYIDSPAVFAWELANEPRCKGCDTSVLYNWIKSTSAYIKSLDSKHMVAIGDEGFGLDTGSDGSYPYGYSEGLNFTMNLGIDTIDFATFHLYPTSWGTSFDWGNGWVKSHGAACTAAGKPCLFEEYGATSDHCNIEAPWQKTALDTTGVAADLYWQYGDTLSSGKSADDGNTIYYGTSEFTCLVTDHVAAIDS

SEQ ID NO: 20897 - protein, 402 aa, Penicillium chrysogenum
MRFISLLSIAGVTGLVLAAPGPSLSKRAGSFVWFGANEAGAEFGSGNIPGELGTDYIWPSTSTIQTLRDAGMNLFRIPFAMERLVPGTLTSSMDATYLASLKSTVNYVTSSGGYAVIDPHNFGRYYGNIITSTSDFAAFWTALASEFASNDKVIFDTNNEFHSQDQTLVLNLNQAAINAIRAAGAKSQYIFVEGNSWSGAWTWTTVNDNMKALTDPQDLIIYEMHQYLDSDGSGTSETCVSSTIGRERVVAATQWLKDNGKRAFLGEFAGGANPVCQSAVTGMLDYLQANSDVWVGASWWSAGPWWGNYMYSLELPSGVGYTYYMSLLRNYFPGSTGSGGTTTAAPTSTPTVATATKTTTTGSSTTGAAHYAQCGGKSWTGATTCASPYACQKQSDYYSQCL

SEQ ID NO: 20898 - protein, 396 aa, Penicillium chrysogenum
MVHFSTIALALASALPQLTQGAGLHTSAVAKGKLYFGSATDNPELTDVPYLTQLSNTDDFGQITPGNSQKWDALEPSQNTFSYTNGDVIANLAAKNGQKLRCHTLVWHSQLPSWVSSGSWTNATLIAAMKNHITNVVTHYKGKCYAWDVVNEALNEDGTYRDSVFYKYIGEAFLPIAFATAAAADPDAKLYYNDYNIESPGSKSSGAQRIVKLVQQYGAKIDGVGLQAHFIVGSTPSQSAQTTNLAAFTALGVDVAYTELDIRMTLPSTTALLTQQSTDYKNTVAACMANTKCVGITIWDYTDKYSWVPSTFPGQGDACPWDKNLVKKPAYAGILAALGGTSSTTTTLVTSTTTAGSGGATRVPLYGQCGGSGWTGGTTCASGTCKHINDWYSQCL

SEQ ID NO: 20899 - protein, 483 aa, Penicillium chrysogenum
MKFTNIVLAASAATVACAYPRGRDAVPNKQSADIKKRANGFTWLGVSESGAEFGEGNIPGTLEKDYTWPKTSQIQILRDAGMNIFRVPFLMERLVPTTMTGTPDATYMAALKSTVKFITDSGAYAVLDPHNYGRYAGSIISSTSDFKAFWKTVATEFATNEKVIFDTNNEYHDLDQTLVLDLNQAAIDAIRAAGATSQYIFVEGNAWSGAWSWTDNNDNLKALTDSEDKVVYEMHQYLDGDSSGTSETCVSSTIGKERLQSATAWLQENNKKGFIGEFAGGVNSDCQAAVDGMLSYMTENSDVWMGAEWWAAGPWWGSYMYSLEPSDGPAYSTYLPILEKYFVDGTASAPASSSSSAPTSTKSAAQTSTTTAAVDVTSTPSSNVQVPSSVVEPSSSASAPAETSAPVAPVVPTPTTVAPTTLVSATSTSTAKPNAQVPTNSPSTGNVAKHYYQCGGINWTGPTVCETGTTCVKQNPYYYQCVA

SEQ ID NO: 20900 - protein, 835 aa, Penicillium chrysogenum
MRALLFFASLGFVAAENGLNGWLRYASLPCSGQCRSNLPSSIVILNTTETSPVYVAGTELQNGLKGVYGKRVQVKHNKCKASSSVVVGTVDQYREICGAAKGVPELEEDGFWLDTKGKNVQILGQNERGALYGTFEYLSMLAQGNHSKVAYATNPSAPIRWVNQWDDMDGRIERGYGGPSIFFKDGQVVDDLTRVAEYARLLASIRINAVVINNVNANATLLSPTNLDGVARIADVFRPYGVQVGLSLNFASPQTYGGLSTFDPLDASVVEWWSKITAQVYDRVPDMAGYLVKADSEGQPGPQTYNRTLADAANLFAKEVQPYGGIVMYRAFVYNKLNESIWTDDRANAAVDFFKDLDGEFDDNVVIQIKYGPIDFQVREPPSPLFANLFNTSMAIELQVTQEYLGQQSHLVYVAPIWKTILDTDLRVDHQPSLVRDIVAGKRFNRKLGGSAAVVNVGTNTTWLGSHLSMSNLYAYGRLAWNPADDAQDILQDWIKLTFGLDRKVLDTITRMSMESWPAYEQYSGNLGIQTLTDIIYTHYGPSPASQDNNGWGQWTRADRDSIGMDRTVANGTGFSGQYPDELAAMYENIATTPDNLLLWFHHVGYTHRLHSGKTVIQHFYDEHYSGAETAQTFLTQWESLEGKIDTERYNHMRHFLDYQSGHSILWRDAINTFYHNLSGIPDQAKRVGHHPWRIEAEDMKLEGYKTYTVSPFETASGSVAIVTTSNSTAGTASTKINFPTGTYDLAVNYYDIYGGQSEWKVYLNNREIGQWIGNSEDTFSHTPSIYLDGHSAIRIKFRGVKVHKGDTLKIVGMPNGNEPAPLDYVALLPAGIVD

SEQ ID NO: 20901 - protein, 425 aa, Penicillium chrysogenum
MWSIPVILSLLIAQLSPVVAKGHQNSCVIKSGGTNVTDDAPAILKAFRECGQNGRIVFEPITYYVNSVMNISWLENVDIDIRGTLLWSTDIPYWLNNSMDVGYQNQSTALIIGGNNVRINGYEKGTFDGNGDYWYQWIREQPNTSNYPGRPHGVTFDSLTNSVIRGLAFLRSQMWTMSIINSHNVLLDGILVNNTGNWAQSSNTDGADTIRSSHITFNNWTVYNGDDSLSMKANSTDITITNCKFYNGLGIAMGSIGQYNDQFETIERITVKDIEYDNTLHAFYIKTWTDDQNGYPPNGGGGGLGFASDMKLTNLTTKGLRGAAFAISQCTRFSGAPGQGNCTNSEFQIRNVEIDGLSGTSESTRLASLQCSAVAPCTNITIVDSTLHLDNGTAASEFLCGNVANPTGFKCTGAPCVGGSATGEC

SEQ ID NO: 20902 - protein, 398 aa, Penicillium chrysogenum
MGFLKLLSTSLATLAVVNAGKLLTANDGDEVVPSSYIVVMNDGVSTAQFETHRNWAANVHARTRSLKGGESGPGKHFDINGMKGYSASFDDRTVKDIASDPTVKYVEPDMVVNATANVVQRNAPSWGLSRISSKKSGATDYVYDSTAGEGIVIYGVDTGIDIGHADFGGRAEWGTNTADNDDTDGNGHGTHTASTAAGSKFGVAKKASVVAVKVLGADGSGTNSQVIAGMDWAVKDSKSRGATGKSVMNMSLGGAYSRAMNDAAANVVRSGVFLSVAAGNEAQDASNSSPASAPNVCTIAASTNSDGSASFTNFGSVVDLYAPGKDITAAYPGGGSKTLSGTSMAAPHVAGAAAYLMALEGVTSDKACARIVELAISSISSAPSGTTSKLLYNGINAQ

SEQ ID NO: 20903 - protein, 651 aa, Penicillium chrysogenum
MASGMLSMCPTPRNTPNRPIRPVRICVCGDEGTGKSSLITSLVKGVFVTNKIQPVLPQITIPPTLGTPENVTTTTVVDTSALPQERNNLAREIRKCNVILLVYSDHYSYERVALFWLPYFRSLGVNVPVVLCANKSDLATGHSETRVVEEEMLPLMAEFKEIDSCIRTSAREHRNVNEAFFVCQKAVTHPIAPLFDSKEAALKPAAVAALQRIFYLCDKDRDGYLSDKELKDFQIRCFSKPLNEADLNHIKDTIQKAYPDSVTESGIDCQGFIHLNKLYSEKGRHETVWIILRAFQYTDNLSLQEKFLHPKFEVPPYASAELSPEGYRFFVNLFLLSDKDNDGGLNEAELASLFAPTPGLPASWVDSSFPSSTVRNEAGHVTLQGWLAQWSMTTFLSPKTTLEYLAYLGFEPSDQSDQSITAALKVTRPRRKRRRPGRVGRNVVQCHVLGAPGSGKSALLDALLSRGFSTTYHPTIQPRTAVNTVELPGGKQCYLILDELGELEPALLENQSKLLDQCDVIAYTYDSSDPDSFSYIPALLAKYPHLEELPSVFIALKADLDRTTQRAEHQPHEYTAMLNMPSPPLHVSVTWSSIQEVFVHIAEAAMEPSTAFPRSEEDVEGKWMSWGIALGAVVCAGAAAVMIWRRVGSGN

SEQ ID NO: 20904 - protein, 206 aa, Penicillium chrysogenum
MKFSTSLIALVAAGLASAQLPDVPACSLSCFLSALQSDGCSELLDFACHCQKTELVTSITPCVEKACEHKDQVSVSNAVVEQCSSAGHPISIPPIETTSASPSETPSASSSVPAETTATPTESASESSSAVESSSAAETDSTTAGTTATGSQPVGSSSGAATSTPLVTKTDSATPSASSPAFNGAANVKGNLAGVAALAAAAAYVL

SEQ ID NO: 20905 - protein, 402 aa, Penicillium chrysogenum
MSITKALAVFALLGSSLALPDRTRHNHSRASPCTPAAGGSASIDDVPAITSAIASCGKGGTILIPAGKTYYLNSPLDFAGCVGCDFQVEGLLKFSSSTETWKGQTAMINIKNIDGLKIRSLTGNGVIDGSGQNAWDLFAKDSSYERPTLLYITGGSNIEVSNLRQKNPPNVFNSVKGDTKTAKFFDLKMDATSKSDNEPKNTDGFDIGASTDVTISNVNVKNDDDCVAFKPGADGVTVKDITCTGSHGLSVGSLGKSSDDFVKNVHVSGATMIKSTKAVGIKTYPSGGGHGMSTVSNVTFTDIVVDGCDYAIQIQSCYGEDENYCVENPGDADLTDIVFDKISGETSGKYKAVTGTLACGARGTCDVKVGGYTVEAPSGGSEVLCANTPSDLGVKCTPGASG

SEQ ID NO: 20906 - protein, 369 aa, Penicillium chrysogenum
MRTSFLSMLALGAAAVSAAPAPSRASELVERGSSTCTFTSAASASASKKACSTIVLDNIKVPAGETLDLSKLQDGTKVIFRGETTFGYKEWKGPLIRVEGSNIEVSGEKGHLINGDGARWWDTKGTNGGKDKPKFFYAHKLKDSSITGLNVKNTPVQAFSVQADNLVLDHITIDNSDGDTKGGHNTDAFDVGESTYITISNANIKNQDDCLAVNSGENIVFTGGYCSGGHGLSIGSVGLRDNNIVKNVTISDSTVTNSDNGVRIKTIYKATGDVSDVTFSNIELSNIAKYGIVIEQDYENGSPTGTPTTGVPITGLTVEKVTGSVESKATPVFILCGDGSCSDWTWSGNDISGGKASSKCKNVPSVASC

SEQ ID NO: 20907 - protein, 529 aa, Penicillium chrysogenum
MASALSFKIYKNALLLAAFLGAAQAQQVGTSTAEVHPSLTWQKCTAGGSCTSQSGKVVIDSNWRWVHNTGGYTNCYTGNDWDRTLCPDDVTCATNCALDGADYKGTYGVTASGSSLRLNFVTQASQKNIGSRLYLMADDSKYEMFQLLNQEFTFDVDVSNLPCGLNGALYFVAMDEDGGMARYPTNKAGAKYGTGYCDAQCPRDLKFINGQANVEGWEPSSSDVNGGTGSYGSCCAEMDIWEANSISTAFTPHPCDDPAQTRCTGDSCGGTYSSDRYGGTCDPDGCDFNPYRMGNQSFYGPSKIVDTESPFTVVTQFITNDGTSTGTLSEIKRFYVQNGKVIPQSVSTISAVTGNSITDSFCSAQKTAFKDTDVFAKHGGMAGMGAGLAEGMVLVMSLWDDHAANMLWLDSTYPTSASSTTPGAARGSCDISSGEPSDVEANHPNAYVVYSNIKVGPLGSTFGSTDSGSGTTTTKVTTTTATKTTTTTGPSTTGAAHYAQCGGQNWTGPTTCASPYTCQKQGDYYSQCL

SEQ ID NO: 20908 - protein, 241 aa, Penicillium chrysogenum
MHSSAILLGLIGIASAQTLNIPSRVGDIVSLPSPSEISGDVDLGNGEYDRGRACDSDEDTGDDNAVFILKDGASLSNVIIGENQLEGIHCEGSCTLTNVWFRDVCEDAISIVGNGDALIKGGGAQEASDKVIQHNGAGTVTIDGFTVVNAGKLYRSCGNCSNNKSKSPRHVVVKNVQASGVSSLIGINSNYGDTSSVSDTCGSDVSHVCQEYEGVEKSEDRESPKLDSTDSCKGQTSLSSC

SEQ ID NO: 20909 - protein, 103 aa, Penicillium chrysogenum
MHFHYQTLGAVLASLVFSTASAAYCRVGDMWPDMHDCHNFFECAAGGIPVLKTCGPGTAYCHETRVCDYEGKIPLCSHKGWKWDVATKKGREGAAHPRGFGDA

SEQ ID NO: 20910 - protein, 425 aa, Penicillium chrysogenum
MKISNTLTQAFGLLLPLSAAVQAKEYSRSEVCQPNHPFKPLPGSQARTRTCHVANHGDGRDDSANVLSALKQCNNGGKVVFDADKKYTIGKALDMTFLKHVDLEIQGHVQFSDDTDYWQENSFKQIFQNATTFFQIGGEDVNVYGEGTLDGNGQVWYDLYAEDPLILRPILVGIVGLNGGTIGPLNLRYSPQWYQFVANSSNVLFDGIDISGYSSSENEAKNTDGWDLYRSTNVVIQNSVINNGDDCVSFKPNVTDILVQNLHCNGSHGISVGSLGQYPGEVDIVQNVLVYNISMFNASDGARIKVWPGGSAAMSTDLQGGGGSGLVKNITYDGMTIDNVDYAIEVTQCYGQKNLTLCNEFPSKLAIEDIVFKNFKGVTSGKRDPDVGMIVCSSPDVCSNIKASNIDVVSPDGDDQFTCTNVSLL

SEQ ID NO: 20911 - protein, 351 aa, Penicillium chrysogenum
MYSLLGPALFGSLVAAHGHVTNIVINGVSFDGWDINSDPYAQTPPVVVAWGTPNTANGFIAPDAYETSDIICHLDATNAKGHAVVAAGDRVFLQWTPDWPVSHHGPIVDYLASCGASGCETVDKTTLEFFKIDGVGLVDGTTVPGFWADDQLIAQDSGWMVEIPSSIAPGHYVLRHEMIALHGAGTEGGAQNYPQCFNLQITGSGSDKPPGVLGTDLYRPTDPGILVNIYTSLSTYIVPGPTLYSGAVSIVQTTSAITASGTPVTGTGGATGGTTTTTTSKASTTTLVTTTNAATTTSKATTTTAPGGGGATQTPYGQCGGSGWTGATACASPAACSSLNPWYSQCVPTAA

SEQ ID NO: 20912 - protein, 300 aa, Penicillium chrysogenum
MRSAVILAALAVGTCARVIEKEVYVTEWTTTTATETVTQWPTNAPSTAVLVKQDPTKPANAAVHTADISKKTTVESVPPAAPTPAPEVEPAEPSSATTWSSTWSSATEAEIQPETSSAAPVATSSATSTTAAATAAPSAGNSYHESVLHYHNIHRSDHSASALTWSDDLAQAAHTLASRCVYEHDTSIPSASGSYGQNIAYGYDEAQVGEKIISQMMYTDEEPYFASLYGQASPDMSNFSKWGHFTQIVWKGTSHVGCATVSCSDLKNAGGAAPFTVCNYGTPGNYAGEYADNVLKPNSA

SEQ ID NO: 20913 - protein, 328 aa, Penicillium chrysogenum
MNRNNHAKPTRWLAILMLLTMQILNANADVVTVWTTIKLPAPTPTAPLHPSYTSLDEFKDDMLEVTNEYRANHDANPLEWNDTLADYSREWAEACIWKHSKSSYGENLAYGYGNVSAAVIAWGEERNMYNFGKPTGFTEETGHFTQLVWKSTTQVGCAAFNCGYSKNDKSKRDDGAEVQEDVFEEDAFRENVFEGVMMAPRSSGDEAEGDGLEGLKATRSEPRAQGWYVVCEYTPPGNVVGSHNSYFRKNVLPKKASAVDSSTESSSPTTPESSSTPRPEPSPNAATSTTIGSQSQPTGGAMRFALDSTLGIMLVGLGTVGVGRGLYT

SEQ ID NO: 20914 - protein, 398 aa, Penicillium chrysogenum
MGFLKLLSTSLATLAVVNAGKLLTANDGDEVVPSSYIVVMNDGVSTAQFETHRNWAANVHARTRSLKGGESGPGKHFDINGMKGYSASFDDRTVKDIASDPTVKYVEPDMVVNANANVVQRNAPSWGLSRISSKKSGATDYVYDSTAGEGIVIYGVDTGIDIGHADFGGRAEWGTNTAENDDTDGNGHGTHTASTAAGRKFGVAKKPSAVAVKVLGADGSGTNSQVIAGMDWAVKDSKSRGATGKSVMNMSLGGAYSRAMNDAAANVVRSGVFLSVAAGNEAQDASNSSPASAPNVCTIAASTNSDESASFTNFGSVVDLYAPGKDITAAYPGGGSKTLSGTSMAAPRVAGAAAYLMALEGVTSDKACARIVELAISSISSAPSGTTSKLLYNGINAQ

SEQ ID NO: 20915 - protein, 398 aa, Penicillium chrysogenum; identical to SEQ ID NO: 20902

SEQ ID NO: 20916 - protein, 397 aa, Penicillium chrysogenum
MGFLKVLATSLATLAVVDAGTLLTASNTDAVIPSSYIVVMNDDVSTAEFSTHREWATNVHARLSRRKNGETGPGKHFEINGLKGYTASFDENTAKDIANDPAVKYIEPDMIVNATANVVQSNVPSWGLARISSKRTGTTSYTYDSTAGEGVVFYGVDTGIDISHSDFGGRAKWGTNVVDNDNTDGNGHGTHTASTAAGSKYGVAKKATLVAVKVLGADGSGTNSGVISGMDWAVKDAKSRGANGKYVMNTSLGGEFSKAVNDAAANVVKSGIFLSVAAGNEAENASNSSPASAAEACTIAASTSTDGSASFTNFGSVVDLYAPGQSITAAYPGGGSKTLSGTSMAAPHVAGVAAYLMALEGVSAGNACARIVQLATSSISRAPSGTTSKLLYNGINV

SEQ ID NO: 20917 - protein, 248 aa, Penicillium chrysogenum
HFDINGMKGYSASFDDRTVKDIASDPTVKYVEPDMVVNATANVVQRNAPSWGLSRISSKKSGATDYVYDSTAGEGIVIYGVDTGIDIGHADFGGRAEWGTNTADNDDTDGNGHGTHTASTAAGSKFGVAKKASVVAVKVLGADGSGTNSQVIAGMDWAVKDSKSRGATGKSVMNMSLGGAYSRAMNDAAANVVRSGVFLSVAAGNEAQDASNSSPASAPNVCTIAASTNSDGSASFTNFGSVVDLYAP

SEQ ID NO: 20918 - protein, 398 aa, Penicillium chrysogenum
MGFLKVLATSLATLAVVNAGKLLTGSDAGAVVPGSYIVVMNDGVSNDVFKNHRDWAATVHARIASRKGGESGPGKNFDINGMKGYTASFDDRTVKDIASDPAVKYVEPDMVVNATENVVQPNAPSWGLPRISSQKPGATDYVYDSTAGEGIVVYGVDTGIDIRHSDFEGRAEWGTNTVDNDNTDGNGHGTHTASTAVGSKFGVAKKASVVAVKVLSADGSGTNSQVIAGMEWAVKDAKSRGVTGKSVMNMSLGGAFSRAMNDAAANVVKSGVFLSVAAGNEAQDASNSSPASAPNVCTIAASTSSDRSASFSNFGSVVDLYAPGESITAAYPGGGSKTLSGTSMAAPHVAGAAAYLMALEGVASDKACARIVELAISSISSAPFGTTSKLLFNGLNAK

SEQ ID NO: 20919 - protein, 495 aa, Penicillium sp.
MATRPLAFAAIAALIHQAASQQAPTPDNLASLPTWKCTTSGGCVQQSTSIVVDWVYHWIHTVNGSTSCTTSSGLDSTLCGTEEECYTNCEISPATYDGLGIKTSGNALTLNQYVTSNGTTSNASPRVYLLDPAGKNYEMLQLLGQEISFDVDASNLPCGENGALYLSEMDATGGRSQYNPAGASYGSGYCDAQCGSSSWFNGSINSAGLGSCCNEMDLWEANGEATALTPHPCSVDGPYGCSGSACGSTGVCDKNGCGFNPYALGDQSYYGPGLTVDTSKPFTVTTQFVTNDGTKTGTLTEIRRSYTQNGKVIANAVASASSGFSGQSSITESFCTAMDSEAGTLGGLTTMGEALGRGMVLIFSIWNDAGGYMNWLDSGSSGPCSSTAGIPSTIQANDPGTSVTFSNIKWGDIGSTGSGTGGSSSSSSSTSTSPKTTSTTTTSATTKTSATTTTTSTGATQTHYGQCGGMSYTGPTVCASPYTCQVQNPYYSQCL

SEQ ID NO: 20920 - protein, 432 aa, Talaromyces stipitatus
MKSSIIVISSLAHFAVSQTADWGQCGGTNWSGDTTCNAGWYCSYQNQWYSQCVPQSSPSSSATTLSTVISSSTSSISTTSPAGSSSSGSASSFPSTSGTQFVIDGKKGYFAGTNSYWLPFLTNNADVDLVMGHLQQSGLKVLRVWGFNDVNSMPSSGTVWFQLLSNGQQTINTGPDGLQRLDYVVKSAEAHGIKLIINFVNNWNDYGGMNAYVKNYGGNQTGWYTNDAAQAAYKTYIKTVISSYIGSSAIFAWELANEPRCNGCSTDIIYNWAQSTSQYIKSLEPNRMVCIGDEGMGLKVGSDGSYPFGYSEGNDFERTLTIPTIDLGTIHLYPSQWSETDSWGSSWLTAHGQACKNAGKPCLLEEYGSTSHCRSEAPWQSTAVSSVGADLFWQWGDALSTGQSPNDEYSIFYGSSDYTCLVTDHVSAINSS

SEQ ID NO: 20921 - protein, 406 aa, Talaromyces stipitatus
MVAVKPLILALAAGHLAHAQLNTAAKAAGLLYFGTAVDNGDLSDSQYLPNLETDDFGQITPANSMKWQPTEPSQGSYTFSQGDQIASLAKTNNDYLRCHNLVWYNQLPSYITSGSWTNETLIAALKEHINGVVTHWKGQCYAWDVVNEALNEDGTYRQNVFYQHIGEAYIPIAFAAAAAADPNAKLYYNDYNIEYPGAKATGAQNIVKSIQAAGARIDGVGLQAHFIVGQTPSLASQKANMAAFTALGVDVAITELDIRMTLPDTSALQTQQSTDYQTTTTACVQTKGCVGITLWDFTDKHSWVPGTFSGQGDACPWDSNYKKKPAYYGILAGLQSGAGGSTTLTTTTTSTPTTTSSPATTTTTGAGSGTGAAHWGQCGGNGWTGPTTCVSPYTCQVVNPYYSQCL

SEQ ID NO: 20922 - protein, 415 aa, Talaromyces stipitatus
MNSFRVLSSLGLLASSVLAGPISIPKRQTSTGQNVVYWGQNGGGIIENPDLAAYCTGSEGIDIIVLAFLYQFGNGVTVPGGSFGQTCSVLATSGTSQSCDAVASAITTCQNKGINVFLSLGGGAGGYSLTSVSEAESIGQYLWDAYGNPSSTSVSRPFGNAVVNGWDFDIENASGSQYYPYLISKLRSNFASDKNNKYYISGAPQCPIPEPNMGTMIQDSEFDMLFIQFYNNNNYTHPCALGINGDAAFNYAQWDSFISTSNSSSAELFIGVPAAPLAANGADTGSIYYATPNQLATIVSATEGNSSFGGVMLWSAGFSDSNVNNGCTYAQEVETILKDGEVCSGSYSVTQTLTPVAPTPSFSGTATGTSTATPTGTPVPEWGQCGGQGYTGSTVCDSGLKCVAEGAYWSSCQPA

SEQ ID NO: 20923 - protein, 394 aa, Talaromyces stipitatus
MTPRPTIVAIASFAVLAVTFVQAQQSGYGQCGGANWTGATSCVSGWTCTFLNDYYSQCLPSSTTLTTSSHSTTSTTSSTATSTPTNTNGGKLKWFGVDESCAEFGTAMPGTWGVDYTFANTATIGEFINQGFNIFRIPFAMERMARGSVGATLDNAYLTNYSVAVDYITSNGAYAVLDAHNYGRYNGNIITDTSAFKTFWSNMATAFKNNSKVIFDTNNEYHDMDESLVFDLNQAAIDGIRGSGATTQYIFAEGNSWTGAWTWNTTNDSLKNLKDPENLLIYEMHQYLDSDGSGTSATCVSSTIGVERIEGATAWLKANGKIGVLGEYAGGPNSVCQEAVTGMLDHLTANNDVWFGAVWWAAGPWWPSSTWSSIEPPSGQAYVYYDNILQAYTP

SEQ ID NO: 20924 - protein, 663 aa, Talaromyces stipitatus
MKLSTSLITLIATVQAQQTAWGQCGGTGWTGPTACVSGWTCNYVNPYYSQCIEGQSTSSSPSTTSTPSTTTSPVSSSSSSSSSAIPFSYNSKSFLLNNQPFQIIGGQMDPQRIPRAYWRQRLQMARAMGLNTVFSYVYWHSLEPSQGVFDFTGNNDLITWFQTVQEVGLKAVLRAGPYPFLTAASSYMQRLAQELHDQQTTQGGPIIMVQVENEYGNYGSDHSYTQVIGNIFKQNWQVTLYTNDGGNQGALSGGQIPGILAEIDGNPQGGFAARNQYVTDQSSLGPLLDGEYYVTWFDTWGPHSGYSTDEGNQGAINGVINDLSWILSNNDSFSIYMFHGGTSFGYGNGGENYGNLTPFITSYDYGAPLDESGRITPIYNDIRNMISNHVPSGTIPSVPSVPTMWSMPTTTLQPVARLFDQLPSATNSSLPQTMEQLGQSFGYVLYSHQATSSISGAVKSGDHARDRVIVYKNGVKQGVIDSIYSHPATVNVQLSSGDTLWLLVENLGRVDYGSPIVDQRKGIVGNVTIGGSVISNWEIYSYPLNTPPSTVDTSNSSISIPSGSQPVFYKGSFVAPSSDSASDTYLTLPGGIKGVVWVNGNNLGRYWIIGPQQSLYLPGCFMKTGSNEIVVLELEPQAGTRVAYGVTSRTWGNNPDPDCNNCS

SEQ ID NO: 20925 - protein, 405 aa, Talaromyces stipitatus
MKISSALINLVLAASVVDGAPHKLQTRSPGGEVVVYWGQNAAAASENNDLSTYCTADSGINIVVLAFLYEYGNNIVIPSGVIGKDCSISTSGEGINCDALASQIATCQSNNVKVILSLGGAVGAYSLTSQSEAEKIGQNLWDAYGKSAGGSIPRPFGSISVDGWDFDLESNSGNQYYQYMISKLRSNFKSDSGNTYYITGAPQCPIPEPNMGEIIQAAQFDYLWVQFYNNEYCSYPNTLNYAEWVSYISRTPSNNAKIFIGVPASELGSTGTESGATYYQSPSILANTVASFDTSSNWGGIMMWDAAFSNANVVDGCNYAQQAQSILKTGSPCGGNDNNSPMFLASTVTSTTTTATPSTSSTTATTASVLVAQWGQCGGDGYTGSTVCASPYRCIRESKYWSSCQ

SEQ ID NO: 20926 - protein, 306 aa, Talaromyces stipitatus
MLSQSLALSILVGGAFSIPVENRANCPNIHVFGARETTVSPGYGSSITVVNDVLNNYPGSTAEAISYPACGGQSSCGGISYSSSVAQGIAAVASAVNSFNSQCPSSEIVLVGYSQGAEIMDVALCGGGDPNQGYSNTAVQLSASAVSMVKAAIFMGDPLFRAGLPYEVGTCAAGGFDERPAGFSCPSAGLIQSYCDSSDPYCCNGNNAATHQGYGAEYGNQAFAFIKSKLSGSSTGGSGGSGGSGGSGGSGGSGGSGGSGGSGGSGGSSGTVAQWGQCGGQGWTGPTQCVSPYTCTAINSYYSQCL

SEQ ID NO: 20927 - protein, 453 aa, Talaromyces stipitatus
MLQYLPVIAAAILTGVEAQTQSVWGQCGGQGWTGATICAAGATCSAINSYYAQCTPAAAASTTLVTKTSSTSVGTTSPATTPTTKPSTTAAASGNPFSGYQLYANPYYSSEVHTLALPSLTGSLAAAATKAAEIPSFVWLDTAAKVPTMGTYLANIQAANKAGASPPIAGIFVVYDLPDRDCAAAASNGEYTVANNGVANYKAYIDSIVKQLKAYPDVHTILIIEPDSLANMVTNLSTAKCSEAQAAYYECVNYALINLNLANVAMYIDAGHAGWLGWPANLSPAAQLFAQVYKNASSPASLRGLATNVANYNAWSLSSAPSYTSGDSNYDEQLYINALSPLLTQNGWPNAHFIMDTSRNGVQPTKQQAWGDWCNVIGTGFGVPPTTNTGDPLEDAFVWVKPGGESDGTSNSSATRYDYHCGYSDALQPAPEAGTWFQAYFVQLLTNANPSLT

SEQ ID NO: 20928 - protein, 419 aa, Talaromyces stipitatus
MSLGHSFKRAGLFSLCLIATGTLVTAGPCDIYSSGGTPCVAAHSSTRALYSSYSGPLYQVKRNSDSATTNISPVSAGGIANAAAQDSFCSGTTCLISIIYDQSGHGNHLTAAPPGGFSGPGPNGYDNLANAAAAPVYLGGQKVYGVYIAPGDGYRNNAANGTATGDGAEGLYAIFDGTHYNGGCCFDYGNAETSSRDTGAGHMEAIYFGNCNVWGTGSGNGPWIMADLENGLFSGASAGKNTGDPSISYRFVTAVVKGEANQWAIRGGNSQSGSLSTFYSGGRPSGYNPMHKEGAIILGIGGDNSHGAEGTFYEGVMTSGYPSDATENSVQANIVAAKYGTSASSGTTTTGTGTQPSSGSGQVHWGQCGGSGWTGPTSCEAPYACQTQNPYYAQFDGFPWETREYLGILSVALQRRVTL

SEQ ID NO: 20929 - protein, 397 aa, Talaromyces stipitatus
MHAFLYIIPTCLISPAIAENGLDGWLRYALLPASLTSHFLTGFPSNIITLNSSINSLVYTAARELQKGLRGIRHKDVDIICSNKSQSQFASIVIGTVDIFTKTFGIGNSWDDLIQDGFSLNISENSVRIIGRNERGTFNPHAPIRCVNQWDNLDGSIERGYEGSSIFFENGVIVRDLTRAAEYARLLASIGVNAVVVNNVNANSSLLTPENIQGLSRIADVFRPLCFAAGGWGLSIYDPLDPGVIKFWWNITNQLYEAVPDMVGYLVKADSEGQAGPLVYNRTLAQGANLFANSLKPHGGVLMFRSFVYNKLNESDWKADRANAAVEFFKDLNGEFDENVIVQIKYGPIDFQVCEPVSPLFANLPHTNTALELQITSGIPRSAMSFGLYASIMEDDS

SEQ ID NO: 20930 - protein, 526 aa, Talaromyces stipitatus
MSALNSFKMYKNALILGSLLATAHAQQIGNLTAETQPSLSWSTCTSGGSCTSKSASITLDANWRWVHSVNGSTNCYTGNTWDTSICDTDTSCAQDCAVDGADYSGTYGITTSGNSLRLNFVTGSNVGSRTYLMADKTHYQLFNLLNQEFTFTVDASTLPCGLNGALYFVSMDADGGVSKQPNNKAGAQYGVGYCDSQCPRDLKFIGGQANVEGWQPSSNNSNTGLGNHGSCCAELDIWEANSISEALTPHPCDTSSQTVCTGDACGGTYSNDRYGGTCDPDGCDFNPYRVGVTDFYGPGMTIDTTKPVTVVTQFVTNDGTSSGTLSEIRRYYVQNGKVFAQPSSKIDGISGNAINSDYCSAEISTFGGNPSFTKHGGLAGVSTALKNGMVLVMSLWDDYSVNMLWLDSTYPTNATGTPGAARGTCSTSSGSPKTVEANSPNAHVIFSDIRVGPLNSTFSGSGTSTPGGGSSTTTSPGSTTTTPGSGSGSGVASHYGQCGGQGWTGPTTCASGFTCTVINPYYSQCL

SEQ ID NO: 20931 - protein, 399 aa, Talaromyces stipitatus
MKTSTALICLGLMASAVIAAPHRLQARGPGGEVVVYWGQNAAAASENNDLSTYCTTDSGIDIVVLSFLYEYGNGNTIPAGVIGNDCSISTSGQGTNCDALASQIATCQSNGVKVILSLGGAVGAYSLTSQAEAETIGQNLWDAYGKSSGGSIPRPFGSTFVNGWDFDIEANSGNQYYQYMISKLRSNFASDSSNTYYITGAPQCPIPEPNMGEIIQNAQFDYLWVQFYNNGYCSYPNTLNYADWVSYVSGTPSANAKIFIGVPASELGSTGTQSGAVYYQSPSVLASTVASFDTSSNWGGIMMWDAAFSDANVINGCNYAQQAHSILKTGSPCGGSGTTPPSTTTTPTQTTSTATATVTATGVPVPQWGQCGGEGYTGSTVCATPYTCVKESQYWSSCQ

SEQ ID NO: 20932 - protein, 833 aa, Talaromyces stipitatus
MFPDENGIDGWLRYAPLSSELASQFKRYGNIIALRNDESSPVRTAAKEIQHGLKRILNQEANIGHDLITGSQVEGPATIVIGTVNSFSHAGGDVSHIAQLKEDGFWLHGDDYDNVQILGQNERGALYGAFAFLMLLAQGKQCPSAHVSNPSAPIRWVNQWDNLDGSIERGYAGPSIFFRDMVVQDDLTRVSQYARLMASVGLNGIIVNNVNSHHDLLSPRNLAGLGRIANAMRPWGVRIGVALFFDTPKILGGLSTSDPLDPGVIAFWDKITAQLYQHVPDLIGYLIKANSEGQPGPLTYGRTLADGANMFADALKRHGAGVVVYRAFVYNHHLDESNWKNDRANAAVEYFKDMDSLFEDNVLVQIKYGPIDFQVREPTSPLFAHLRKTPTIIEFQVAQEYLGQQSHVCYLPPLWKTILDFDLRVDGKPSLVRDIVSGERFGWNQSGYAAVVNVGSDSTWLGSHLAMSNLYAYGRYTWDPTSNEVDVIQDWTRLTFSSHSTVVDTVTSISMESWPTYENYTGNLGIQTLCEITKTCHYGPRPDAADGNGWGQWTRADAHAIGMDRTVATGTGYAGQYPVEVAEKFEKVKTTPDDLLLWFHHVPYTHKLKSGKTVIQHFYDAHYEGAANAQTFAPRWKAIQGLIDDSRFQHVLFRLVYQAGHAIVWRDSINEFYKAKCSIPDEQGRVGNYPWRIEAESMDLTGYAVVPITPFEAASGGKAIITTSNDKPGTAKYTVPFESGVYNIAVNYYDHLGGTSQYKLFVGGQLIGEWAGDLSKVLLHDFSDLRDGHSATRITFDTVHVNKGDVIELIGTPDGTELAPIDYVSFLPPGLVD

SEQ ID NO: 20933 - protein, 243 aa, Talaromyces stipitatus
MKLTYFALLHALVGAACAYQATTTASSLFRDPNEISTDKGNGVYTAAGSQALYDTAGATWCGAGCGKCYNLTSTGSSPCTGCGLGGAAGESIIVMVTNLCPYNGNQQWCPEVGSTNQYGYSYHFDIMAQSEIFGDNVVVDFEPVDCPGQATSDWETCVCYGQTATDVTPVGLTGGGGSSGSSSTSPTNPTTSSSTRTSTSSSAGATQTVYGQCGGGGWTGATVCASGSTCQVVNQWYSQCLPS

SEQ ID NO: 20934 - protein, 483 aa, Talaromyces stipitatus
MATTLIFVMGLWSGLLWSTTVAQASCAAIWAQCGGSGFSGPSCCETGSTCTQLNSFYSQCTPTTQISSASPTGTNPSSVTSLVPSGSSYTSTTSLSTATATQVPYPAVNSSSCGAWALVENVCCPYYCTSNNESESCTSSCSGGCGSPDASMCKSGTMWGEQTTVGTDESWHYSRSTHFGLTSGGACGFGLYGLCTKGSSTANWTDPMLGDTCNAFCTAYPLLCRDPSNVTLRGNFAAPNGDYYTQFWPSLAAEGNPDNYLSCGECFELIRTKADGTDYTVGEDGYTDPIYLEIVDSCPCSANAKWCCGSGADHCGEIDFKYGCPIPKDSHHMDLSDIAMGRLQGNGSLADGVIPIRYKRVPCPKPGNVYIWLRDGAGPYYFSLSAVNTNGVGSVINVEVQGSGQTGWTALERDPNYSSSRPQERYGAWVVPQGAGPFNVPIGIRITSPDGQQIVNTEMITSFTAPASAPSGFWYIDMGVQFT

SEQ ID NO: 20935 - protein, 253 aa, Talaromyces stipitatus
MHHSYFLKLILPTLLALTTAAPLTQRNTILNEFLTNLLKYLPAINTTINDATSIITDLDTLLAKLVGAKTTQNQLISASTSGSSCAEWTLIWARGTSEPGNMGVLVGPPLVWALQDIVGTNGLTIQGVNSYSASVAGYLAGGDASGSANMASLITQAHKSCPNTKLIAAGYSQGCQVTHNAISQLDAATAAWIDKVLLFGDPDNGQAIPHVNAANVYTVCHPGDDICLNGDLILVPHLTYAENVAAAAAFATA

SEQ ID NO: 20936 - protein, 297 aa, Talaromyces stipitatus
MRLFFFLFALLSSTLTSAAITRGQFSQVTDSWGSNPTNTGFYIYVPRNLASKPGIIVAIHYCTGTAQAYYQGTPYAQLAEQYGFIVIYPSSPYSGTCWDVSSHAALTHNGGGDSNSIANMVTWTTSQYNADTSKIFVTGSSSGAMMTNVMAATYPELFKAAIVYSGVSAGCFYSAAGQVDAWNSSCAQGQVEASPQAWASIAENMYPGYSGARPKMQIYHGSIDTTLYPENYNETCKQWAGVFGYNYGAPQQVEQNNPQSQYTTTIWGPNLHGIYATGVGHTVPVNGARDMQWFGFA

SEQ ID NO: 20937 - protein, 633 aa, Talaromyces stipitatus
MATVRICVCGDEGTGKSSLITSLVKGVFVTNKIQPVLPQITIPPTIGTPENVTTTTVVDTSALPQERTNLAREIRKSNVILLVYSDHYSYERVALFWLPHFRSLGVNVPVVLCANKADLATDTTDAQVIEEEMLPVMAEFKEIDSCIRSSARQHRNVNEAFFLCQKAVTHPIAPLFDSKESVLKPAAVAALQRIFYLCDKDRDGYLSDKEIEDFQLKCFGKPLSEEDLVHIKETIQKAYPDAVAPAGITSRGFLHLNKLFAEKGRHETVWIILRTFQYTDNLSLQETYLHPKFEVPPFSSAELSPEGYRFFVDLFLLSDKDNDGGLNNSELASLFAPTPGLPSSWADDSFPSSTVRNEAGHVTLQGWLAQWSMTTFTSPKTTLEYLAYLGFESSDRSNPSTTAALKVTKPRKRRRRPGRVGRNVVLCHVLGAAGSGKSSLLDAFLSRGFSNTYHPTIQPRTAVNTVELPGGKQCYLILDELGELEPALLENQSKLLDQCDVIAYTYDSSDPDSFAYITKLRAKYPHLEELPSIFLALKADLDRTTQRAEFQPHEYTARLGLPAPPLHVSVTWSSIQEVFVHIAEAAMDPSTTFPRTEEDLESKWMSWGIALGAVVCAGAAAVAIWHRVNSSSS

SEQ ID NO: 20938 - protein, 268 aa, Talaromyces stipitatus
MKLTKATSLLALITLPLLAFADVEFIEPRAGSTVKSGDILTAYWKDSGDLPSLLELHEYDLFLCAGGPEIEYSEELALLVPNGLFDKGNSVSFQIRSDLGSEYPDAYFLKMTSRGTNNMTLVNYSERFSVTGMTGTFSELVQYGLLLAANDTAKYHQELKLRKRQVATAIIPAKDVYNVPYPQQTRGLTKYAPMGKRPATTITAKSGPPQFPTSAFEVAHTFLPIPTWQTTLTASRTWTTSGMENPATPAPHPKDDMQIYLRRWADDE

SEQ ID NO: 20939 - protein, 475 aa, Talaromyces stipitatus
MATKVLGFAAIAALFHKVTCQQAPTPDNIASLLTWKCTNSGGCIQQSTSIVVDWVYHWIHTVNGSTSCTTSSGLDSNLCGSEQECYANCEISPATYDSLGIKTSGNALTLNQYVTSNDNAGKNYEMLQLLSQEISFDVDVSNLPCGENGALYLSEMDVTGGRSQYNPAGASYGSGYCDAQCGTGTWFNGSINSGGLGSCCNEMDLWEANSKATALTPHPCSVEGPYGCSGSACGSTGVCDKNGCGFNPYALGDQSYYGQGFIVDTSKPFTVTTQFVTSDNSKTGTLTEIRRSYVQNGKVIANAVASASSGFSGANSITESFCTTMDSEAGTLGGLNTMGEALSRGMVLIFSIWNDAGGYMNWLDSGNSGPCSSTAGIPSTIEANDPGTSVTFSNIKWGDIGSTVSDTGGSGSSSSSLISTKTSSTTTTSATRTATSSGATQTHYGQCGGMYYTGPTVCASPYTCHVQNQYYSQCL

SEQ ID NO: 20940 - protein, 391 aa, Talaromyces stipitatus
MMFWTASLLLVIPVVTAQSPVYGQCGGNGWSGATTCASGSCCTYSNDWYSQCLPCSGGGGGGTSTTLTTTTKTSSTTSSTSTGASNPTTCPLPAQYKWTSTGPLANPASGLLSLKDFSHVPYNGQHLVYSSDVNSGGNYGSLNFALFSNWSQMASASQSQMSQGAVAPDLFYFAPKKIWVMGYEWCASAFCYLTSSDPTNANGWSSAKPLYEGSLSGGNGPIDPAIIGDDENMYLFFAGDNGNIYRTSMPIGNFPASFGSSAQTILTDSTYNLFEAVQVYSVQGQNLYLMIVECIGASGSRYFRSFTATSLGGSWTPQASTESNPFAGAANSGATWSQDISSGDLIRSSADQTKPVDPCNLQLLYQGRDPSSNGGSYNNLPYRPGLLTLAK

SEQ ID NO: 20941 - protein, 328 aa, Talaromyces stipitatus
MKANYFPLWALAGSASAYLATTTRYYDGQEGACGCGGSSGLDSWQVGSSSTGFYTAAGSQALFDTDGSSWCGGGCGKCYNLTSTGTSACNGCGEGGVAGESIIVMVTNLCPYNGNEKWCPSVGSKNDYGYSYHFDIMAESEVFGDNVVVNFEPVACPGQATSDWETCVCYGQTDTDSTPAGFSTVAGSSEPTATSSTSTAAASSKTSTTLVISTTPVKEVASSSTSSTSTVKPVTETSPAAVAPTSTVPSVPEGAATTSTYSLTLTTVVTETITVWETPTSTSGSSAAVQTLYGQCGGINWTGATTCATGATCKVQNPYYYQCVSSSN

SEQ ID NO: 20942 - protein, 375 aa, Talaromyces stipitatus
MRSFIGLAGLACLSSVVLAVPAPAPTAPAKLEDRAASCTFSGSNGAAAASKSKTSCSTIVLSSVAVPSGTTLDLTNLNDGTKVIFEGTTTFGYAEWSGPLVSVSGNDITVEGASGAVLDGDGSRWWDGKGSNGGKTKPKFFYAHNLKSSSISNIKILNSPVQVFSIDGAQTLTLDHITIDNSAGDSQGGHNTDAFDVGDSNGVTISNAIVQNQDDCLAVNSGTNIIFTGGTCSGGHGLSIGSVGGRSDNTVQTVHIENSTIKNSQNGVRIKTVYGATGSVSGVTYKDITLSGITKYGIVIEQDYENGSPTGTPTNGVPITGLTIDGVTGSVTSSATEVYILCGSGSCSNWTWQGVNITGGKKSSSCKNVPSGASC

SEQ ID NO: 20943 - protein, 151 aa, Talaromyces stipitatus
MDGVNGPGRIGQASKLQSGKTVIQHFYDAHYTGAAAAQTFPTKWETLKDKIDDERPVVWRDAITEFYHNLSGIPDDTGRVGTENYPWRIQGENMDLVGYTPYVVNPFETASNFTTIITTSNTTAGTASTHINFPTGKYDIAVNYYDVIGGI

SEQ ID NO: 20944 - protein, 434 aa, Talaromyces stipitatus
MKFNFSLKLLLVASTALAAPSIEERTTAVSRNDIIGPKNSFKPLPETCKRHKVCHVRSHGDGKDDSDNILDALRTCNNGGRVIFDQEYTIGRALDLQFLKHIDLDITGTMKFTNDTNYWINNAFQITFQNSTTFFKLGGQDVNIYGGGTIDGNGQVWYDLFTQNATLQRPILMGIIGLEGGSIGPLKLRYSPSWYHIVANSSGVVFDGIDISGYSSSGNVAKNTDGWDTYRSDNIVIQNSVINNGDDCVAFKPNSTNILVQNLHCNGSHGISVGSLGQYAGETDIVENVLVYNISMFNASDGARIKVWPGIVSELEASLQGGGGSGSVKNVVYDTMSVHNVDWAIELTQCYGQSNQALCDEYPSNLTISDIWFKNFSGVTSTKEKNKIATLVCSSPNVCSNIFAEDINVVSPSGYNQAVCTNVDDSLLQLNCTK

SEQ ID NO: 20945 - protein, 293 aa, Talaromyces stipitatus
MGISSVFVALSALVAGGAFALPAPEPVAPAGPFFELRSGNTSLSNLARRAEPVNYNQDYVAGGANVQYSPNQGAGSFSVNYNTQGDFVVGLGWQPGDANPINYSGTFSAQGVGILAIYGWSTNPLVEYYVMEVHDGYQTAGTHKGTLTSDGGTYDIWEHQQVNQPSIQGTSTFNQYISIRQSPRTSGTVTIQNHFDAWANAGMNLGTLNYQVMAVESWSGSGSGQISLSKGTSSGSGGNGGGSGGSGGSGGSGGSTTGAAQWGQCGGTGWTGPTTCQSPYTCKVINPYYSQCQ

SEQ ID NO: 20946 - protein, 422 aa, Talaromyces stipitatus
MRILTLRSLLLAPVALGYVVNEGTTYQIYPEALTHNGQAVDDAPSIHQAFDLCGINGTVIFTNNTFHINSILNTTNLLNCNVSLRGELRFSTNTPYWKSHVYSVIYQNQSTAWLFGGINTWYTENKNQANQPGRPISITFYNSTNLLADGLTIFQPQFWATLVWQSTNVSLRNFYVNATSNDEWGTVNTDGYDSWRSSNLLVESATIINGDDCVAAKGNTTNLLVRHVTCHGSAGMTIGSIGQYPEWPDYVENVTFDGVRCINSSTGAYIKTWQGIPVDQDSNGDVGGGGLGLVKNVTFKNFEMINTSLPIQISQCMYSESSGACNTSKLQIEDVSWVNITGTSRYNVVASLYCSDPVPCPGIIFDNVTFESVNHTLGLPMWNTTMQDEVYQCANIDGQNSSGIPCNRVAPDSFGGVSHNVQ

SEQ ID NO: 20947 - protein, 358 aa, Talaromyces stipitatus
MAIPLVLLLAWLLPTVFAASLTQVSNFGDNPGSLQMYIYVPNNLASKPAIIVAMHPCGGSATQYYGMYDYHTPADQYGYILIYPSATRDLNCFDADTAASLTHNGGSDSLSIVNMVKYTISKYGADSSKVYMTGSSSGAIMTNVLAGTYPDVFAAGAAFSGMPFACLSGAGGADPAMSNQTCSRGQINHTPQEWAAYVHNAYPGYTGQYPRLQVWHGTADNVISYTDFNQEISQWTTVMGLSFTSNQTNTPLSGYTKMIYGDGSRFQAFSASGVGHFVPTDVSVVLDWFGITGGGGGNGGGSGSTTTTTSATTTSTGPTGGCTAAHWDQCGGNGYTGCTSCASPYTCQKVNDYYSQCL

SEQ ID NO: 20948 - protein, 384 aa, Talaromyces stipitatus
MVNVFSTCAVFLALTTSVIAKPVAEPAITPAPKLLDKRATSCTFSESNGASSASESQKSCSTIILSNVAVPSGQTLDLSDLPDHTTVVFEGETTWSYQEWDGPLLQISGNGITVEGASGAYLNPDGARWWDGKGSNGGKKKPKFFSAHDLTSSSITNLLIQNTPVQAVSINGCNGLNITDMTIDNSAGDTEGGHNTDGFDIGSSTNVVITGANVYNQDDCVAVNSGTDITFSGGVCSGGHGLSIGSVGGRSDNTVETVKFENSEVKNSVNGIRIKATEGDTGTITGVTYSQIILQDISGYGILIEQNYNGSDLNGGTPSSGIPITELTVEHISGSGAVESGGYNVVIACGKGACSNWTWEDVVVTGGKDYGSCSNVPSVASCSA

SEQ ID NO: 20949 - protein, 512 aa, Talaromyces stipitatus
MKLLTVVGKIILLARTATALNNGLAVTPQMGWDDWNAFGCSLSQNLVLSTANTILKTGLRDLGYHYIILDDCWSSGRTSSNVLIPDANKFPNGMKYLGDQLHAQGFGFGIYSSAGTKTCAGYPGSLGYETVDANTFASWGVDYLKYDNCNNNGQSGSQAASSARYNAMEKALAASGRNILYAICNWGQDSPWIWGPSVGNSWRITGDISDNFNTQNSACPVPNSGGYDCSVTQIMSKQATISQYSAKGGWNDLDMLEVGNGGMSDSEYVAHFSVWAAAKSPLIMGNDMSKLIASDYSILANPAIIAVNQDPLGVAATYRWTRNNVQLWSGPLVSTTGSSVNDQVVVLYNNGGSSTTVSVALSDVFGSSSSVPSSQLEIRDLWGSRLSNSQAQTILNQGASANPSWLYNATAKSYATGLSQGDSMLLGTSIGSVTGASGTIQQTVSGNGCRVFRLRASKASSTSTTTTTTTSSSGQSLQTQWGQCGGQGWTGPTECQSPYTCQVQNDYYSQCK

SEQ ID NO: 20950 - protein, 428 aa, Talaromyces stipitatus
MYWLTNLAPIAWICATALAAAASKGGVLKKGNVCTVTALGGKRDDVQNILEAFSSCGKHGTIIFPEDENYWIATRLNPVVSNVVIEWRGVWTFSDDFDYWRNNSYPIAFQNHHAGFILTGDHITIKGHGTGQIYGNGNAWYNAEQAVTQPGRPMPFVFWNVSEVLVEDFTVKDPPLWSLNIMNGTNMVFNNITCNATAVNAPYGTNWVQNTDGFDTMDANNIQLNGLTYQGGDDCIAIKPRSYNIRVSDVKCHGGNGIAIGSLGQYLEDASVKNVVVDNVEIIRYNEDMHNSAYIKTYMGGRVPQSSYESAGLPNGGGWGTVENILFSNFHIQGANTGPAITQDTGDNGTFKGTSLMAISNVAFVNFTGYLNNVANNRIASVSCSNVHPCYNIDFQNVKLNPSQNVSAYGNVSCSYIESGGVHGLLGC

SEQ ID NO: 20951 - protein, 376 aa, Talaromyces stipitatus
MRSFITLTGLAIFCSSVALAAPAPAPIAAAKFENRASACTFSGSNGAALASKSKTSCSTIVLSNVAVPAGTTLDLTGLNEGTKVIFEGTTTFGYKEWAGPLVSVSGSDVTVEGAPGAVLNGDGARWWDGKGSNGGKKKPKFFFAHNLKSSNISNIKIENSPVQVFSINGAETLILDSITIDNSVGDSTGAHNTDAFDVGDSNGVTISNANVQNQDDCLAINSGTNIIFTGGTCSGGHGLSIGSVGGRSDNTVKTVHIENSTIKNSQNGVRIKTVSGATGSVSGVTYKDITLSGITKYGIVIEQDYENGSPTGKPTSGVPITGLAIDGVTGSVSNSATGVYILCGKGSCSNWTWEGVKITGGKKSSKCENIPSAASC

SEQ ID NO: 20952 - protein, 242 aa, Talaromyces stipitatus
MRYLSFYFLSFHTVLASNYSLPQTLTRAPPTPTLEQRAGTIIVVTVTVTPSAAPVSPSYTNPELFEYDILNQTNYYRRQHNATGVIWNDTLATYAKQWAKPCNWKHSGGPYGENLAEGYSNVTAAVDAWAIESKKYDYNRPTGFSEKTGHFTQLVWKATTDVGCGLADCSANLNGDNGGKTGKAVGWFLVCEYWPPGNVVGDHDKYFEENVEPLVSLGTWLKVNVFDVWLMIVFAVLILTFL

SEQ ID NO: 20953 - protein, 336 aa, Talaromyces stipitatus
MSYQYSHQDHGHPPLPPDWRAQWVPEENQYIFINERTGQRSWHHPEVPPGNHGSGTRDIGGPPGPGNYGGPPPPGPGYGGPPPPSGRGYGGGPPPPGSGYGSPPPPGGRGYGGPPPLGGRGYGGPPPPGPGYGGPPPPVGRGYSGPPPPGPSYGSPSPGGRGYGSPPPSQGYGTPPPHGYGSPAPAPAPAQQKSHGLALGIGGGVLGAAVGAWAMHEHDKHKEEEKEEEWREEEKRLQEREHAREREQEREIEAQREELYEEQREIQRERDERYEAEALYENERRYDDERRFEEERYEDERRYDDERRYEDERRFIEDEQIIDDERRYEDRYDDRW

SEQ ID NO: 20954 - protein, 465 aa, Talaromyces stipitatus
MKFKRDVLLGVVSLVCLAQPSLQQASACASSYSQCGGIGFTGATCCPTGWSCQTQDSYYAQCLSGTVFLQEFLTFLQPTSSAGSGGSTGPVTTSSPPTTRTTPYRTSTTFLTGAALASHTQVPYTTLECDNADCGSGTIYPDITTVNDSMPWHYSRSTHFGETPAGACGFGLYGMCTTASVSGIDLGDDCAQFCSMYPDLCADPANYTLRGNFAAPNGNYYTQFWPMLPSLDTRAEQDNYLSCGECFELVRTYPNGTLYTTSDSGYAPPIILEIVDSCPCSANTKWCCGPGVDQCQEVSDFKYGCPLPNGSIHLDLSDVAMTRAQAGVLVEGVIPTQYKRVPCPKKGNVYLWLRGSAGPYFFQITAVNAAGLGSIVGFEIRPDGQSDWLALVQEDDYPEGHPQERYGAWTLPANAGPINLPMGVRLTSATGEQIVNEAVITNWTAPNTAIAGYWYINMGINFSQL

SEQ ID NO: 20955 - protein, 491 aa, Talaromyces stipitatus
MRLSISTLSVAVIWQVTTAQLVGPVGPTTTLEEKNIECNILHYGAKSDNSTDISTALEETFTQCVLKQPGSRLIIPEGEYLLNRSVVLSNGTDWALQLDGVITAAYGGNWTVDRELILQGFAGVDVLNSTINGEGDNKFLLDVLVIVNAVDFEFYSSNGRGAIQGQGYIYRNLNNTDRPRLVRLISPTNASVHDLILVDSPKFHIVLDFALNVEAYHITVRGGNLGSYDGIDAIGTNYWIHDNEVTNRDECVSVKSPSHHALVENLVCNQAGSGVSIGSLNVSAEISNIVARNISIVQGNNIAFIKTYPGGSGYVTNVTFENFRSLTSLYGLSINQYWQNKLTPDTGSVALSNILFRNFSGSVANGTLRPPLYLIANDLTFATNITVEDFSVWTETGTQVLNQISNVFGHGDDSYGPNDGIPSLNPGETPYAYTSTYTITASPTSWQAPTTPKWAVPSTGYGTASPIPVYTPAPLWKPGGVDYDLHYWGSF

SEQ ID NO: 20956 - protein, 193 aa, Talaromyces stipitatus
MSHSEVPGKNGVDGSVGPPGPPGRDGSDGARGPPGPVGLRGQDGTDGARGLPGKDGQRGTDGRDGRDGRDGRDGVNGAQGPPGPMGPRGQDGVAGARGSPGQDGQRGKDGRDGKDGKNGVDGAQGPPGAMGPRGRDGMDGVRGPPGQDGRDGRDGANGLPGPPGQNGRDGRDVHDNRNNVIRFTGRIQGSAIS

SEQ ID NO: 20957 - protein, 529 aa, Penicillium occitanis
MSALNSFNMYKSALILGSLLATAGAQQIGTYTAETHPSLSWSTCKSGGSCTTNSGAITLDANWRWVHGVNTSTNCYTGNTWNSAICDTDASCAQDCALDGADYSGTYGITTSGNSLRLNFVTGSNVGSRTYLMADNTHYQIFDLLNQEFTFTVDVSHLPCGLNGALYFVTMDADGGVSKYPNNKAGAQYGVGYCDSQCPRDLKFIAGQANVEGWTPSANNANTGIGNHGACCAELDIWEANSISEALTPHPCDTPGLSVCTTDACGGTYSSDRYAGTCDPDGCDFNPYRLGVTDFYGSGKTVDTTKPFTVVTQFVTNDGTSTGSLSEIRRYYVQNGVVIPQPSSKISGISGNVINSDYCAAEISTFGGTASFNKHGGLTNMAAGMEAGMVLVMSLWDDYAVNMLWLDSTYPTNATGTPGAARGTCATTSGDPKTVESQSGSSYVTFSDIRVGPFNSTFSGGSSTGGSTTTTASRTTTTSASSTSTSSTSTGTGVAGHWGQCGGQGWTGPTTCVSGTTCTVVNPYYSQCL

SEQ ID NO: 20958 - protein, 384 aa, Penicillium occitanis
MTRLLVGSVVLAVLATCAIAKPVAEPAITPAPNLLDKRATSCTNSGSSGACSASASQKSCSTIILCNVAIPSGKTLDLSSLPDDTTVIFEGQTTWGYEEWDGPLLQISGTGITVEGASGAYLNPDGARWWDGEGSNGGKTKPKFFYAHDLTDSTITNLHIQNTPVQAVSINGCDGLTITDMTIDNSAGDTEGGHNTDGFDIGSSTNVVITGANVYNQDDCVAVNSGTDITFSGGVCSGGHGLSIGSVGGRSDNTVDTVKFENSEVKSSVNGIRIKATEGDTGTITGVTYSGITLSSISKYGIIIEQNYDGGDLDGGTASSGIPITDLTIENISGSGAVSSSGYNIVITCGSGACSSWTWEDVVVTGGKDYGSCTNVPSVASCST

SEQ ID NO: 20959 - protein, 407 aa, Penicillium funiculosum
MTLVKSILLALAAGHVAQAQLNTAAKAAGLLYFGTAVDNPDLSDSKYLVNLETADFGQITPANAMKWQPTEPSQGSYTFTQGDQIASLAKSNNDYLRCHNLVWYNQLPSYITSGSWTNATLIAALKEHINGVVTHYKGQCYAWDVVNEALNEDGTYRQNVFYQHIGEAYIPIAFAAAAAADPNAKLYYNDYNIEYAGAKATGAQGIVKLIQAAGGRIDGVGLQSHFIVGQTPSLATQKANMAAFTALGVDVAITELDIRMTLPDTSALQTQQSTDYQTTTTACVQTKGCVGITLWDYTDKYSWVPGTFSGQGDACPWDSNYNKKPAYYGILAGLQSGSGSSSSTSSTTLITTTTPTASSSTTSATTTSATSGAAHWGQCGGIGWSGPTICVSPYTCQVLNPYYSQCL

SEQ ID NO: 20960 - protein, 345 aa, Penicillium funiculosum
MVKSYIIGAFVLELASVVLGQQSLWGQCGGTGWTGPTTCVSGACCQEQNPYYSQCIQGNCSPASSTSSTSSTKTTTTSASSTTTSTSASGTSLSSGCGKALSLKSGTYTTTVAGQQRQYTLTLPSNYNPNKAYQLIFGYHWLGGTMGNVVSGSYYGIQPLAGDNAIFVAPQGLNNGWGNTNGDDIIFTDQMLSTLENALCIDETQIYSMGWSYGGAMSYALACARPDVFRAVAVMSGANLSGCSPGTQPVAYYGQHGVSDTVLPFSLGEGIRDTFVKDDHCTPTNPPAPAAGSGTHIKTEYSGCDSEHPVWWIAFDGPHEPLATDAGASSSWTPGQIWSFFSLFH

SEQ ID NO: 20961 - protein, 457 aa, Penicillium funiculosum
MLRYLSIVAATAILTGVEAQQSVWGQCGGQGWSGATSCAAGSTCSTLNPYYAQCIPGTATSTTLVKTTSSTSVGTTSPPTTTTTKASTTATTTAAASGNPFSGYQLYANPYYSSEVHTLAIPSLTGSLAAAATKAAEIPSFVWLDTAAKVPTMGTYLANIEAANKAGASPPIAGIFVVYDLPDRDCAAAASNGEYTVANNGVANYKAYIDSIVAQLKAYPDVHTILIIEPDSLANMVTNLSTAKCAEAQSAYYECVNYALIKPHLAHVAMYIDAGHAGWLGWSANLSPAAQLFATVYKNASAPASLRGLATNVANYNAWSISSPPSYTSGDSNYDEKLYINALSPLLTSNGWPDAHFIMDTSRNGVQPTKQQAWGDWCNVIGTGFGVQPTTNTGDPLEDAFVWVKPGGESDGTSNSSATRYDFHCGYSGALQPAPEAGTWFQAYFVQLLTNANPALV

SEQ ID NO: 20962 - protein, 529 aa, Penicillium funiculosum; identical to SEQ ID NO: 20957

SEQ ID NO: 20963 - protein, 529 aa, Penicillium funiculosum
MSALNSFNMYKSALILGSLLATAGAQQIGTYTAETHPSLSWSTCKSGGSCTTNSGAITLDANWRWVHGVNTSTNCYTGNTWNTAICDTDASCAQDCALDGADYSGTYGITTSGNSLRLNFVTGSNVGSRTYLMADNTHYQIFDLLNQEFTFTVDVSNLPCGLNGALYFVTMDADGGVSKYPNNKAGAQYGVGYCDSQCPRDLKFIAGQANVEGWTPSTNNSNTGIGNHGSCCAELDIWEANSISEALTPHPCDTPGLTVCTADDCGGTYSSNRYAGTCDPDGCDFNPYRLGVTDFYGSGKTVDTTKPFTVVTQFVTDDGTSSGSLSEIRRYYVQNGVVIPQPSSKISGISGNVINSDFCAAELSAFGETASFTNHGGLKNMGSALEAGMVLVMSLWDDYSVNMLWLDSTYPANETGTPGAARGSCPTTSGNPKTVESQSGSSYVVFSDIKVGPFNSTFSGGTSTGGSTTTTASGTTSTKASTTSTSSTSTGTGVAAHWGQCGGQGWTGPTTCASGTTCTVVNPYYSQCL

SEQ ID NO: 20964 - protein, 282 aa, Penicillium funiculosum
MGISSILLSALIAGGALALPAAEPVSFDIRDENITLARRAEAINYNQDYIASGANVQYSPNMAAGSFSINYNTQGDFVVGLGWQPGDANPITYSGSFSASGVGILAVYGWSTNPLVEYYVMEVHDGYQTAGTHKGTVTTDGGTYDIWEHQQVNQPSILGTSTFNQYISIRQSPRTSGTVTVQNHFNAWAQAGMNLGTLNYQVMAVESWSGSGSGQISLSKGTGGGSTTTTPTGPTSTSTAPSSGGTGAAQWGQCGGIGWTGPTTCVAPYTCKYENAYYSQCQ

SEQ ID NO: 20965 - protein, 379 aa, Penicillium sp.
MLLSTHSIVLGLLGSTSLALASPAAEPAEGNRLIPRGSACTYSGVNGAAAAIAGKAGCSSITLNNVAVPAGTTLDLTGLAAGTKVIFEGTTTFGHKQWVGPLISISGTNIAVSGAAGHVIDGQGARWWDGKGSNTKTNIKPKFFLAHNLKGASTITGLNIKDTPVQVFSIDSSSGLTISGVTIDNRNGDKGSLGHNTDGFDIGDSDHITITGATVYNQDDCLAINSGTNIIFSGGYCSGGHGLSIGSVGGRSNNVVDTVHISSTQVVNSQNGVRVKAVAGATGSIKGVTYQDITLSGITSQGVTIRQDYTNSGYTGNPTTQVPITGLTLNNVHGTVTSSGTDITVECGSAASCSGWTWTKVAVSGGKADLCKNAPANTC

SEQ ID NO: 20966 - protein, 409 aa, Talaromyces pinophilus
MTIISKFGIGVLIAMVSEATAQQTVWGQCGGIGWTGPVSCVSGSYCAPGNAYYSQCLPGSGPSTTTARTTITTSSSFTTSVSTTAIPTSTGKVQFAGVNIAGFDFGMVTSGTQDLTQIVDESVDGVTQIKHFVNDDTFNMFRLPTGWQYLVNNNLGGQLDATNFGQYDKLVQGCLSTGAHCIVDIHNYARWNGAIIGQGGPSDAQFVDLWTQLATKYKADSKVVFGVMNEPHDLTISTWAATVQKVVTAIRNAGATSQMILLPGTDYTSAANFVENGSGAALAAVVNPDGSTHNLIFDVHKYLDSDNSGTHAECVTNNVDAFSSLATWLRSVGRQALLSETGGGNVQSCATYMCQQLDFLNANSDVYLGWTSWSAGGFQASWNYILTEVPNGNTDQYLVQQCFVPKWKS

SEQ ID NO: 20967 - protein, 410 aa, Penicillium janthinellum
MMAQDKRTLLALLALGGSALGQQTAWGQCGGQGWTGATTCVSGYYCSFQNNWYSQCLPGAASTTSTSTTTTTVYSTTLKTTTTSSTSSAPTGKVRFAGVNIAGFDFGVVTSGTQDLSQVVDESVDGVNQMSHFVNADTFNIFRLPTGWQFIVNNNLGGSLDSNNFGKYEQVGSGLSLSGAYCIVDIHNYARWNGGVIGQGGPTDDQFISLWTQLATHYKSNSRVIFGIMNEPHDLNIATWAATVQKTVTAIRNTGATSQMILLPGTDYTSAANFIENGSGAALLPVTNPDGSTTNLIFDVHKYLDSDNSGTHAECVTNNADAFNNLATWLRSNKRQALLSETGGGNVQSCATYMCQQLDILNANSDVYLGWTSWSAGGFQASWNYVLTEVPVNGVDQYLVQQCFVPKWKN

SEQ ID NO: 20968 - protein, 540 aa, Penicillium glabrum
MAAEISYRVYKNFLFFSTLLAAAQAQQVGTLTTETHPSLTWQKCTSAGSCTTVSGSVVIDSNWRWVHSTSGSTNCYTGNTWDTTLCPSDTACAVNCALDGADYSSTYGVTTSGSSVQLNFVTQNSNGANVGSRLYLLEDASTYQIFDLLNQEFTFDVDVSNLPCGLNGALYFVDMDADGGMAKYSTNKAGAKYGTGYCDAQCPRDLKFIDGEGNSDGWVASSNNANTGLGNHGSCCAEMDIWEANSVSTALTAHPCDTPGQTMCTGDDCGGTYSSNRYAGTCDPDGCDINPYRNGDTSFYGAGKTVDTTKPFTVVTQFVTDDGTSSGTLSEIKRYYVQNGVVIPQPASKVSGVSGNSITADYCTAENTAFDGVGGFAKHGGMEGVSAALADGMVLVLSLWDDYYADMLWLDSTYPTNDTTTTPGAARGSCDISSGVPATIESSDASAHVIFSNIKIGPFNSTFSGTSSSGSTTTSKTTTTSKTTTTSKTTTTTSKTTTTAASTTGAAHYSQCGGIGWTGATTCASPYTCQVQNAYYSQCL

SEQ ID NO: 20969 - protein, 386 aa, Penicillium echinulatum
PPASRSISSTTEALHARLASPHGSGEVIRPDTVGDPLLLAVDDVVLNIFRVPFLMERLIPNSMTASPDAAYLKGLTDTINFITSLGAHAIVDPHNYGRYYGKVITSTSDFKAFWTTVAKQFASNDKVIFDTNNEFNTEDQSTVYDMNQAAIDAIRAAGATSQYIFVEGNSWTGAWTWVSVNSGLANLTDPQNKIVYEMHQYLDSDGSGTSGTCASSTIGKERVTSATQWLKDNNKLGFLGEFAGGANSVCESAITGMLDYMQANSDVWLGASWWAAGPWWGNYFASMEPPSGAGYTYYYKILSNYFPGKSTGGGSTTTTTTAPATTTTKAPVTTTTTTTAPATTTATGGATAAHWAQCGGVGYSGPTACASPYTCKVQNDYYSQCL

SEQ ID NO: 20970 - protein, 398 aa, Penicillium nordicum
MGFLKLFTTSLATLAVVNAGKLLTASDAHAVIPSSYIVVMNDGVSNAEFKTHRDWAANVHARITSRNSAESGPGKHFDINGMKGYSASFDDRIVKDIASDPAVKYVEPDMVVNATENVVQPNAPSWGLPRISSKKPGATDYVYDSTAGQGIVIYGVDTGIDIEHPDFEGRAEWGTNTADNDNTDGNGHGTHTASTAAGSKFGVAKKASVVAVKVLGGDGSGTNSQVISGMDWAVKDAKSRGVTGKSVMNMSLGGAVSQAMNDAAANVVKSGVFLSVAAGNEAQDASNSSPASAPIVCTVAASTSSDGSASFTNFGSVVDLYAPGEAITAAFPGGGSKTLSGTSMAAPHVAGAAAYLMALEGVTSDKACARIVELAISSISSAPSDTTSKLLYNGINAK

SEQ ID NO: 20971 - protein, 367 aa, Penicillium sp.; identical to SEQ ID NO: 20833

SEQ ID NO: 20972 - protein, 341 aa, Pichia pastoris
MNTLLLLHPTIVTEPQAVEAAKDSLAQKLGTDKSNISQHIIDRVATGQVSLRPSYYNHIQYLAPPEANVKKLPVKCYEIIFEALQSNGVFEGTIPPESATDGILQGFLVESDTKWVKPSTLGSVVSLKRPAGQNKTKSSAFKKEMPFFKKLSSPPTLTDSSEADEDEESQLNEKLKGSKLIYFDESSDDEIIDEDELLRDDDGALKGPVVVPVKCALPNGKRRKKACKDCTCGLKELEENEQNERLDAQASILSKLATSANAEAEKIEERLRRKQASKEGEEVKFTEQEVTEIDFTIQGKTGGCGSCALGDAFRCDGCPYLGLPPFKPGQAISIEGLGADI

SEQ ID NO: 20973 - protein, 445 aa, Pichia pastoris
MLEYMEYLEQCFAKNSQWDYNNLYEHVLDSSASILQFKIPHGFKFSVSSSSSPYNYNSISFENRGKGRLNGSLAYFYTTQELSNYKTSKNIPLQDVIDSYRLVNIPKNDRSYTDNEESKRPWLLYGRMYLPSQSMEAMAIKRLTANTQLMLKGVNILNPTPTPFNNKLTSLSFYLQSNYYKWSREAIFLSSDALFGLRFLYNFGNSTNPQCTPSIDSNNISTLSLGTELWYGAMNMTPGLSTTLRYTSFSVTGNPLTFTLACNPILGSVSTTYSIKTNVFTTLCSKFDFNFYSYESDLTIGCDLWRFGNNEDVPDSNPTPLPSKERELFIPLHDHQLVFPEQEKAKTISNEPKDYESDLLLKFLEIQGIKTARQSVATINNFTQKIKNAPFTSALKLNTSLKNHTVNLMWEGKYNDFLLSTGCSLNLDLKRPNVDGFGLQIQYSS

SEQ ID NO: 20974 - protein, 269 aa, Pichia pastoris
MSLEVNWEQIASSEAIREQLVDWLNDQLKAVEVPKYLADIHVTSLSLGSKAPEITIRDIGKPFDDFYDIEEERAGTGEGDEDDGRVAPTSTPMKHQTSGSSDQTDASNPISPSTSHDHENDMQFVTEIKYDSDICVEVAAQLLMNYPAEKFISLPVRLKLSDLLIHTLAVVAYVNHRVFISLLCDISENEDTDNTESHSGNLRALSSKTASRIDVVKRLKVESELGSYEPDNGSILRSVGKIETFLVDTIRNLLVQEVGWPNWIEFQGV

SEQ ID NO: 20975 - protein, 489 aa, Pichia pastoris
MSFNINWDSIQKESLSAWTAELLNDALNSGKRPNVLCTDIQIEDLSFGTIPPDFEILEIGDLSSDSFRGIFKFNYDGDASITLRTKVQANPLKIYEDNLLDQFEDDQRELGEFIKPRFVMATDILEIPLNLKLSQIKLSSIIIIVFSRSKGLTLVFKNDPLESISVSSTFDRIKPLARFLQNKIETQISELFKEFLPSVLYKFSQKYTTENFADFHRELLHTQHPERNTENRVTLQDIDPEAPLIISPGSLMRLTTLSSSRQTLTLGGKISADKLNPDIITKNYFNELIPKTYNKFQLKADKVADIAQNIHSIKNLQSRIFWKNSKNNDKPHRRVVCLGDKDKSKEKCKQVESESLYRRSVYSQGSIFNDGASDVSTLTESTEVEQEAPNTEFPKLQAVDLKPDMSVETIIQNSSQEKHRKVKPIDDIGLIGRRKERLRELLKYDVVDFSMPPMPGSPTKFFNTNIFHDSNHINNGNLPIRVAPPPYQC

SEQ ID NO: 20976 - protein, 333 aa, Pichia pastoris
MFKTLLLPLVLWEARVLAENEDELGIPFHIVNTLPEDEYYNSTASRYIDTLWGTQANAIAVAGYYYEQLIIQEVLFTLTTDGILQGNDSDSKVEVTSPGGRLTYREENEGTPGFSLDLNDPPALLLDGATPTIWICPSGNTPEVHIYDESPGDDCLEYLVSVQPLEPGTIDPPGDGDDGPGDGDDGPGDGDDGPGDGDGDDGPGDGDDGPGDGDDSPGDGDDGPGGGSGGGSGGGSGGGSGGGSGDGSGGGDDEDDTTTTTSSSTTSSPATSPTTSTTSATGTSTPTSTPGTTTSAPTTTSSPEATNAGGAANLVGPNGLPGLIGGVAIALLI

SEQ ID NO: 20977 - protein, 264 aa, Pichia pastoris
MFWLLVLSLISQALAVVEFTSPEGGETFSVSGSTVTIPIEFKDDESFPSIADASNLVISLCTGPNGDISCSEIETTPPADLLSGSTYEYDASVLATFGRSGSYYLQIYSKYSGGYAIVYSDRFSLQSMTGTLTPSGSGSPPANDISMSNAQNAEISKSFTVPYTLQTGRTRYAPMQTQPSGTVSATGWTRRYPTSSVSYYSTLVPSPAVYSTITPGWDYSYTSAVNFATPAPYPSQNGGWYAASRRISRPFIQATTALQRRWAY

SEQ ID NO: 20978 - protein, 629 aa, Pichia pastoris
MNEIRVVVCGDEGVGKSSLITSLLKEKFVENIQHLLPPVSIPRDYSSSPYTPDITILVDTDSSDIATLQKEIRQADVIWLVYSDNYSYERISLYWLNMFRSLGVNLPVVLCNNKCDLENSGPEEREQAIIDEMIPILKEFKEVESCIRCSAKLNYNVVQASYLCQRAVTYPISPLYDYKEGELKSQAILALKRVFYLSDKDHDEVLNDHELEVLQTKCFHKTIDINELQKIKSTVEGICAVGTFHGLTEEGFLALCKYYAQTGRHETIWGILRTFHYTDSLSLSDKVLYPRLDVNVHSSVELSPIGYEFLVNLFVLSDTDNDGGLSDQELDNLFKPTPGIPELWKDSNFPRTVVCNEQGYVTLQGWLAQWCMTTFLDYKVTLAYLGYLGFESPRGSVAALRVTKPRKTRTKDGKSYRCATNDRTVFNCFVLGAPKSGKTSLLEAFLERNFHETYSPTIKPRMVVNSVEVKGGKQCYLILEELGELTPAVLENQTRLNQCDILCYTYDSADPDSFQELVDLREKYPKLDELPVVFVALKADLDRQQQRCKHQPDSYTKSLLIQPPLHISFSWGSSLNELFIQLVETAVNPKLSTPGIEQDQENDSINSIAIVASVISGVILASIWYYRGK

SEQ ID NO: 20979 - protein, 614 aa, Pichia pastoris
MSTLTLLAVLLSLQNSALAAQAETASLYHQCGGANWEGATQCISGAYCQSQNPYYYQCVATSWGYYTNTSISSTATLPSSSTTVSPTSSVVPTGLVSPLYGQCGGQNWNGATSCAQGSYCKYMNNYYFQCVPEADGNPAEISTFSENGEIIVTAIEAPTWAQCGGHGYYGPTKCQVGTSCRELNAWYYQCIPDDHTDASTTTLDPTSSFVSTTSLSTLPASSETTIVTPTSIAAEQVPLWGQCGGIGYTGSTICEQGSCVYLNDWYYQCLISDQGTASTTSATTSITSFNVSSSSETTVIAPTSISTEDVPLWGQCGGIGYTGSTTCSQGSCVYLNDWYFQCLPEEETTSSTSSSSSSSSSSTSSASSTSSTSSTSSTSSTSSSTSSSSIPTSTSSSGDFETIPNGFSGTGRTTRYWDCCKPSCSWPGKSNSVTGPVRSCGVSGNVLDANAQSGCIGGEAFTCDEQQPWSINDDLAYGFAAASLAGGSEDSSCCTCMKLTFTSSSIAGKTMIVQLTNTGADLGSNHFDIALPGGGLGIFTEGCSSQFGSGYQWGNQYGGISSLAECDGLPSELQPGCQFRFGWFENADNPSVEFEQVSCPPEITSITGCARTDE

SEQ ID NO: 20980 - protein, 314 aa, Pichia pastoris
MDEDDEYLYGSDDEQPQQIGAPETKTASSEKSSTAVKTETGPVSDDEDDNDNSDYSDSDSDIDIVIGALEPSTQPAASTTASSAVPEDNPGENDDAATQVPSAAGKLRIATGSLDVDKVGEYDGKPITQLELQDLKEKPWRLPGSDLADYFNYGFDEFSWSYYCSKQDKTRKEFNPAKLMNELLPAGGFPPSGMPPMPGMPGMPPMPGFMPGMPGMPPMQGMQGMQGMPPMQGMPSMPSMPSMPGMPPMFNNNPANGSSSSSAQQQQAPKRPVNERDSADRERERNRERDRERDAYRDRDRDRDRDRDRRRRRN

SEQ ID NO: 20981 - protein, 1618 aa, Pichia pastoris
MLSLTKLFIGIILGAFVAAEQSDVEPACYARQWENTFPPSNIYVSSATWVRDNVYDVTLRYEAESLHLRSLGELKVIGLNSPVSGTKVVYSRNSKIYEINDPSSWSTTIRVNAKDSADGCHVEMYPFQIQVEWCQAGADTDECSSWPYPSVYDYDIGCDNMQDGVSRKHHAVYRWLKHSVSGCSAASTVAAISSQTTSSSQTSTSSQSSSSTAISSVTTQTTQTTTSGVPIWGQCGGNGHSGSTSCAEGVCVYVNDWYYQCQPGASTTTTSQASSSQVFSQLTTTEESISSEESIGLTSTVETTSSAEVVESTTSGNQAIPTIEFDVEIEFPAAEITEEETTETEEQVPLHGKCGGIGHTGSTTCANGICTYVNDWYYECLPREAESEEEVPLYGQCGGINYSGATKCAEGVCTYVNDWYYQCLIGPATGTPQSTSSTDSQSVSESSAAEDSTPTEEAEESAEESTSTEDAEESTEDFATTEEVEESTSTEDAEESTSTEEAEESTSTEDAEESTSTEEAEESTEESTSTDEVEESTSTEEVEESTEESTSTDEVEESTSTEEVEESTEESTSTEDAEESTSTEEAEESTEESTSTDEVDESTSTEEAEESTEESTSTDEVEESTSTEEVEESIEESTSTEEPEESTEELTSTEEAEESTSTDEVDESTEESTSTEEAEESTEESTSTDEVEESTSTEEVEESTEESTSTEDAEESTSTEEAEESTEESTSTDEVEESTSTEEVEESTEESTSTEDAEESTSTEEAEESTEESTSTDEVEESTSTEEVEESTEESTSTDEVEESTSTEEVEESTEESTSTDEVEESTSTEEVEESTEESTSTEDAEESTSTEEAEESTEESTSTDEVDESTSTEEAEESTEESTSTEDAEESTSTEEAEESTEESTSTEETEESTEELTSTEEAEESTEEPTSTDEVDESTSTDDVDESTSTEGTEQFSSTDVPQGRPGFENPTEEVESSSTEEFEEPTSTDETDESTEEATSTEEAEESISTDDVEQSTSVEEAEESTEESTSTEALEESTSTGDFENISAVDEELEESTEESTSTEEVEESTSTEDAEESTSTEEAEESTEESTSTEDAEESTSTEEAEESTEESTSTEDAEESTSSDEVEESTSTEEVEESTEESTSTEDAEESTSTEEAEESTEESTSTEDAEESTSTEDAEESTSTEYVEESTSIPSSTSEPSLSTSISPSSSSSFETATVTTDVSTTVLTTTDCGEQTCYKSLIITGVTEKTITTSGRTTVITTYCPLPTETVIPTPVVVTSTIYADETITETTCYVTGAIEKTVTVGGSPTVVTVHTTLPIEAIKPTPVTVTSTIYADETVTKTTCYETGAIEKTYTIGGSSTIVTIHTPLSTVQPTPVTVTSTIYADETVTKTTCYVTGAIEKTYTVGGSASVATVYTPLPTEPSKTSIVTLTSVISNSGSHPLTTSIVTGAVEKTITVDGTASIVTVHTPIASVYSSAHEHSKVTKAITPSTTTIIRDVCDSHSCTQATIETGVVSKTITIGQSVTTVVPSYVPLEHEQQEVHTTAATPVDSSVHSQSGSPVPPAITTQSYSAQASSVPVASYYEGSANNLVFSVASGVAALIVNALFL

SEQ ID NO: 20982 - protein, 313 aa, Pichia pastoris
MKLSTNLILAIAAASAVVSAAPVAPAEEAANHLHKRAYYTDTTKTHTFTEVVTVYRTLKPGESIPTDSPSHGGKSTKKGKGSTTHSGAPGATSGAPTDDTTSTSGSVGLPTSATSVTSSTSSASTTSSGTSATSTGTGTSTSTSTGTGTGTTGTGTTSSSTSSSATSTPTGSIDAISQTLLDTHNDKRALHGVPDLTWSTELADYAQGYADSYTCGSSLEHTGGPYGENLASGYSPAGSVEAWYNEISDYDFSNPGYSAGTGHFTQVVWKSTTQLGCGYKECSTDRYYIICEYAPRGNIVSAGYFEDNVLPPV

SEQ ID NO: 20983 - protein, 365 aa, Pichia pastoris
MDIEDENHAKNISQWLEDNALSADSEYKQMSSDLEDSTMRFHNNQDQNEPGQEEAYGKMQQEAYNAHAAQIDDFIDIEGLEGGDNNALAYNDMLPTTSDLNFTPLLSPNASSILTPSLPSQTYSFTPLTSPMIDAIPNLRTKRTSVESDHKYTGHKDSLRSSRGTDIPPPMKKTKTPSSTPAFGPVTSRRSSPLLQPKKGSNNTTPVLISNNNSSFNQDFALPESSLPGPVTPLDLMGFKVQKQQSEDKGKSKSADKKATHKLAEQGRRNRMNNAIQELDAILPLEMRKYVTTPSKATTVELACQYIQSLLERIGELEKPPQSSPNDKTTNDSTLPANASPEDQADNNYNPANDTDSISPLEFEK

SEQ ID NO: 20984 - protein, 593 aa, Pichia pastoris
MTVEIYVKNPRVYLGLDEFDGVSDGDKELEKLASLRERRKLVLPDPNNIVGHEELINWLTEAEFSTIDELNKVSHSENDRYINQILWLRYLSVKGKQDQYDVKIVDTFGITFPKANETNYTFELLLQEIARLRLKEDKELYTLLYEYSTKTFQSIPILSSLIDILLRGENNTNELIRTFKVYESIITEYEQVHGLNSSPYVVLFLEKLASLTSRLIKEEGSHELILNFIKTLKLKFEDFTEKFQVPFKFYALDSIHIDPIFCDPVFVSRISPVISSLIQSCEYLCQNSLDAPDLKKNLEQSVKFHHFFIQLNPKLPVSLGLVKTLVKLNQIQSATKIMKKTLQTDATNFKYINFMIVLLVASREYSTATKLINSTLLYIEQDSELSKAENDDIINLKILEILVIEKIHSPQVALNYLNDLFETYHKFYGQPGNASPLLDKIWLLASVLYENNKLYDEASNCLNEMAKPDLSRKAWLNIAQNKYQEAHDQIESVLTPIPSSFSPQARFSAILGLSHLAYNHPETFKSQKDIKSVQARCHTNLQRLRSDYTFSNHHHVYHFLSLSYEKLGDQVSLQEVLSYTVNLPDIILDLDEL

SEQ ID NO: 20985 - protein, 295 aa, Pichia pastoris
MRLLHISLLSIISVLTKANAECCYTNTHTTTEVWYTTVYARDVSEETSSTLAGGSATVSSEVSSTIESSVATSATTESSSETSGSTSGSTSATESSTGSSSLATSSSITSSESSTITQTTGQESTSPTPSSSETGSSTTTPYDISPTASSDFDAFKYQILDEHNIKRALHGVDGLEWDEEVYAAAQAYADAYTCDGTLVHSGNSLYGENLAYGYSTRGTVDAWYSEIEYYDFNNPGYTPGVGHFTQVVWKSTTKLGCAFKYCNDYYGAYVVCNYSPPGNYVNEGYFEANVLPLVD

SEQ ID NO: 20986 - protein, 416 aa, Pichia pastoris
MFKKLLPLVLLKAKVFADDTDWHASPVTFRIVNIRPEPPYNGTGTRVGYWSVQDGVIVDTGLAIEFFLNDTVLQGNGSNSKLEVTSPGGRLTFNEENEGTTGFSIVLNDSAELLLNGAAPTVWICQSGDTSEIHIYDESPGDDCEQYHVALESEQFSSIPEDPCDNPEYADECDDAGGSGGGSSGGNDGGSGGGSGGGSGGGSGGGSGGGSGGGSGGGSGGGSGGGSGGGSGGGSGGGSGGGSGGGSGGGSGGGSGGGSGGGNDGGSGGGNDGGNDGGSGGGSGGGSGGGSGGGSGGGSGGGSGGGNDGGSGGGNDGGNDGGSGGGSGGSSGGGDDEDDTSTTTSGSTTSSPATSPTTSTTSATGTSTPTSAPGTTTSAPTTTSSPEATNAGGAVNLVGPNGLSGLIGGVAIALLI

SEQ ID NO: 20987 - protein, 295 aa, Pichia pastoris; identical to SEQ ID NO: 20985

SEQ ID NO: 20988 - protein, 606 aa, Pichia pastoris
MSHELFSLNFKQLMTVEIYVKNPRVYLGLDEFDGVSDGDKELEKLASLRERRKLVLPDPNNIVGHEELINWLTEAEFSTIDELNKVSHSENDRYINQILWLRYLSVKGKQDQYDVKIVDTFGITFPKANETNYTFELLLQEIARLRLKEDKELYTLLYEYSTKTFQSIPILSSLIDILLRGENNTNELIRTFKVYESIITEYEQVHGLNSSPYVVLFLEKLASLTSRLIKEEGSHELILNFIKTLKLKFEDFTEKFQVPFKFYALDSIHIDPIFCDPVFVSRISPVISSLIQSCEYLCQNSLDAPDLKKNLEQSVKFHHFFIQLNPKLPVSLGLVKTLVKLNQIQSATKIMKKTLQTDATNFKYINFMIVLLVASREYSTATKLINSTLLYIEQDSELSKAENDDIINLKILEILVIEKIHSPQVALNYLNDLFETYHKFYGQPGNASPLLDKIWLLASVLYENNKLYDEASNCLNEMAKPDLSRKAWLNIAQNKYQEAHDQIESVLTPIPSSFSPQARFSAILGLSHLAYNHPETFKSQKDIKSVQARCHTNLQRLRSDYTFSNHHHVYHFLSLSYEKLGDQVSLQEVLSYTVNLPDIILDLDEL

SEQ ID NO: 20989 - protein, 1416 aa, Pichia pastoris
MLSLTKLFIGIILGAFVAAEQSDVEPACYARQWENTFPPSNIYVSSATWVRDNVYDVTLRYEAESLHLRSLGELKVIGLNSPVSGTKVVYSRNSKIYEINDPSSWSTTIRVNAKDSADGCHVEMYPFQIQVEWCQAGADTDECSSWPYPSVYDYDIGCDNMQDGVSRKHHAVYRWLKHSVSGCSAASTVAAISSQTTSSSQTSTSSQSSSSTAISSVTTQTTQTTTSGVPIWGQCGGNGHSGSTSCAEGVCVYVNDWYYQCQPGASTTTTSQASSSQVFSQLTTTEESISSEESIGLTSTVETTSSAEVVESTTSGNQAIPTIEFDVEIEFPAAEITEEETTETEEQVPLHGKCGGIGHTGSTTCANGICTYVNDWYYECLPREAESEEEVPLYGQCGGINYSGATKCAEGVCTYVNDWYYQCLIGPATGTPQSTSSTDSQSVSESSAAEDSTPTEEAEESAEESTSTEDAEESTEDFATTEEVEESTSTEDAEESTSTEEAEESTSTEDAEESTSTEEAEESTEESTSTDEVEESTSTEEVEESTEESTSTEDAEESTSTEEAEESTEESTSTDEVEESTSTEEVEESTEESTSTDEVEESTSTEEVEESTEESTSTDEVEESTSTEEVEESTEESTSTEDAEESTSTEEAEESTEESTSTDEVDESTSTEEAEESTEESTSTEDAEESTSTEEAEESTEESTSTEETEESTEELTSTEEAEESTEEPTSTDEVDESTSTDDVDESTSTEGTEQFSSTDVPQGRPGFENPTEEVESSSTEEFEEPTSTDETDESTEEATSTEEAEESISTDDVEQSTSVEEAEESTEESTSTEALEESTSTGDFENISAVDEELEESTEESTSTEEVEESTSTEDAEESTSTEEAEESTEESTSTEDAEESTSTEEAEESTEESTSTEDAEESTSSDEVEESTSTEEVEESTEESTSTEDAEESTSTEEAEESTEESTSTEDAEESTSTEDAEESTSTEYVEESTSIPSSTSEPSLSTSISPSSSSSFETATVTTDVSTTVLTTTDCGEQTCYKSLIITGVTEKTITTSGRTTVITTYCPLPTETVIPTPVVVTSTIYADETITETTCYVTGAIEKTVTVGGSPTVVTVHTTLPIEAIKPTPVTVTSTIYADETVTKTTCYETGAIEKTYTIGGSSTIVTIHTPLSTVQPTPVTVTSTIYADETVTKTTCYVTGAIEKTYTVGGSASVATVYTPLPTEPSKTSIVTLTSVISNSGSHPLTTSIVTGAVEKTITVDGTASIVTVHTPIASVYSSAHEHSKVTKAITPSTTTIIRDVCDSHSCTQATIETGVVSKTITIGQSVTTVVPSYVPLEHEQQEVHTTAATPVDSSVHSQSGSPVPPAITTQSYSAQASSVPVASYYEGSANNLVFSVASGVAALIVNALFL

SEQ ID NO: 20990 - protein, 313 aa, Pichia pastoris; identical to SEQ ID NO: 20982

SEQ ID NO: 20991 - protein, 629 aa, Pichia pastoris; identical to SEQ ID NO: 20978

SEQ ID NO: 20992 - protein, 614 aa, Pichia pastoris; identical to SEQ ID NO: 20979

SEQ ID NO: 20993 - protein, 264 aa, Pichia pastoris; identical to SEQ ID NO: 20977

SEQ ID NO: 20994 - protein, 540 aa, Rhizopus oligosporus
MLARTFLGMAISAFLASTGVQAAWSSNGPNVMYYWGQNSAGGSNTQASLGTYCESGQVDAVLLSFLHVFNVGGTPEINLSSACAGTYFPNTQLLSCPAVGADIKKCQDKGVKVILSLGGAAGVYGFTSDAQGQQFAQTIWNLFGGGSSDTRPFGDAVIDGVDLDIEGGASTGYAAFVNALRQKFSSNFLIGAAPQCPFPDAILGSVLNSASFDYVNVQFYNNYCSATGSSFNFDTWDNWAKTTSPNKNVKIMFTIPGSPTAAGSGYVPMSTLQTIVPSLASEYSSYGGVSVWDASQAWNNGDFSSQLYSLVHSGGSTPPPSSSTIKTTTKATTTSTKTTTTAAPTATSAPGSCPVANQSCSTQNQYACTADGKYAVCDHGKWVVSSCPSGTVCIPTTDGTSIYCGYATGSGSTCPSASALEIAAASFGSKNGPVPRPYKASKVAAQLAVTSTDKNSFEAVINARRTTLTPFEKSVTIEFTTPSNIKFTESDMGPVRQVGNKVRIQAKNDYNESMTLVVKVKGSINSGVFVAPSTSAWKFK

SEQ ID NO: 20995 - protein, 542 aa, Rhizopus oligosporus
MLTRTFLGMAISAFLASTGVQAAWSSHGPNVMYYWGQNSAGGSNTQASLGTYCESGQVDAVLLSFLHVFNVGGIPEINLSSACAGTYFPNTQLLSCPAVGADIKKCQDKGVKVILSLGGAAGVYGFTSDAQGQQFAQTIWNLFGGGNSDTRPFGDAVIDGVDLDIEGGSSTGYVAFVNALRQKFSSNFLIGAAPQCPFPDAILGSVLNSASFDYVNVQFYNNYCSATGSSFNFDTWDNWAKTTSPNKNVKIMFTVPGSSTAAGSGYVPMSTLQTIVPSLASKYSSYGGVSVWDASQAWNNGGFNSQLYSLVHSGGSTPPPPSSSSATKTTTKTTATSTKTTTTTAPTATSTPGSCPVANQPCSTQNQYACTADGKYAVCDHGKWVASSCPSNTVCIPTTDGASIYCGYATGSGSTCPSVSALEITAASLGSKNGPVPRPYKASKVAAQLAVTSTDKNSFEAVINARRTTLTPFEKSVTIEFTTPSNIKFTESDMGPVRQVGNKVRIQAKNDYNESMTLVVKVKGSINSGVFVAPSTSAWNFK

SEQ ID NO: 20996 - protein, 28 aa, Rhizopus stolonifer
IDPVNVKKLQCDGDTYKCTADLDFGDGR

SEQ ID NO: 20997 - protein, 179 aa, Rhizopus javanicus
  MOD_RES (42)..(43): Any amino acid
  MOD_RES (60)..(60): Any amino acid
  MOD_RES (69)..(69): Any amino acid
  MOD_RES (71)..(71): Any amino acid
  MOD_RES (73)..(73): Any amino acid
DDNLVGGMTLDLPSDAPPISLSSSTNSAGGKVVAATTGKIIXXFTSLLSDTNGYVLRSDXQKTIYLVFXGXNXFDLYQREPRLSPKNLSIFTVGGPRVGNPTFAYYVESTGIPFQRDIVPHVPPQSFGFLHPGVESWIKSGTSNVQICTSEIETDCSNSIVPFTSILDHLSYFDINEGS

SEQ ID NO: 20998 - protein, 392 aa, Rhizopus niveus
MVSFISISQGVSLCLLVSSMMLGSSAVPVSGKSGSSNTAVSASDNAALPPLISSRCAPPSNKGSKSDLQAEPYNMQKNTEWYESHGGNLTSIGKRDDNLVGGMTLDLPSDAPPISLSSSTNSASDGGKVVAATTAQIQEFTKYAGIAATAYCRSVVPGNKWDCVQCQKWVPDGKIITTFTSLLSDTNGYVLRSDKQKTIYLVFRGTNSFRSAITDIVFNFSDYKPVKGAKVHAGFLSSYEQVVNDYFPVVQEQLTAHPTYKVIVTGHSLGGAQALLAGMDLYQREPRLSPKNLSIFTVGGPRVGNPTFAYYVESTGIPFQRTVHKRDIVPHVPPQSFGFLHPGVESWIKSGTSNVQICTSEIETKDCSNSIVPFTSILDHLSYFDINEGSCL

SEQ ID NO: 20999 - protein, 392 aa, Rhizopus oryzae; identical to SEQ ID NO: 20998

SEQ ID NO: 21000 - protein, 383 aa, Rhizopus oryzae
MVQFLSLSSSVAAFFLLSLGIHDVAAAANCVVAPSSGDAAANIVSAFNSCNNGGTVTFTKGVTYNLNSVVTIQGLKHVNVNFAGTINLPARSSSFKNLDHYIELKGDNVQVFGGGTVNGNGQAWYDAQDHTAPTVFRFSLTNSKVSGINIINAPRAHLGVTNSQNLVLDNITLKTVSTSKNLAKNTDALDVSSSQGIIFQNSHLTVGDDCLAVNAGVTNITLNNVNCVGGHGFSVGSLGKGGATENVNLVRILNSSCTNCQNGVRIKTWPGGKGKVSDVKYIGLSLVNVDNPIIITTHYCDQNQESYCNGNDASSLSITGVTISGITGSVSSAGNPIVDIDCSTNTPCTDFTISGVTVNKASNTKKNVCINLQGSSGFPICSQ

SEQ ID NO: 21001 - protein, 366 aa, Rhizopus oryzae
MKFITITSSALLALALGTEMASAAKCSKLYGQCGGKDWNGPTCCESGSTCKVSNDYYSQCLAPESNGNKSSECSKLYGQCGGKDWNGPTCCESGSTCKVSNDYYSQCLAPESNGNKTSESAHKTTTTTAPAKEITTTAKASNSSNSSGKYSIVSGGASGNGVTTRYWDCCKASCSWPGKANVSSPVKSCNKDGVTALSDSNVQSGCNGGNSYMCNDNQPWAVNDNLAYGFAAAAISGGGESRWCCSCFELTFTSTSVAGKKMVIQVTNTGGDLGSSTGAHFDLQMPGGGVGIFNGCSKQWGAPNDGWGSRYGGISSASDCSSLPSALQAGCKWRFNWFKNADNPSMTYKEVTCPKEITAKTGCSRK

SEQ ID NO: 21002 - protein, 338 aa, Rhizopus oryzae
MKFITIASSALLALALGTEMASAAECSKLYGQCGGKNWNGPTCCESGSTCKVSNDYYSQCLPSGSSGNKSSESAHKKTTTAAHKKTTTAAHKKTTTAPAKKTTTVAKASTPSNSSSSSSGKYSAVSGGASGNGVTTRYWDCCKASCSWPGKANVSSPVKSCNKDGVTALSDSNAQSGCNGGNSYMCNDNQPWAVNDNLAYGFAAAAISGGGESRWCCSCFELTFTSTSVAGKKMVVQVTNTGGDLGSSTGAHFDLQMPGGGVGIFNGCSSQWGAPNDGWGSRYGGISSASDCSSLPSALQAGCKWRFNWFKNADNPSMTYKEVTCPKEITAKTGCSRK

SEQ ID NO: 21003 - protein, 360 aa, Rhizopus oryzae
MKFLTIASSAILALAVGTEMAHAAECSKAYYQCGGKNWDGPTCCESGSTCVDYPDNPFYSQCVPNENLTSTNKSSHKTTTTESAKKTTTTKGSKKTTTTEASKKTTTTEASKKTTTTEASKKTTTTTKKASTSTSSSSSSASTNYSAVSGGASGNGETTRYWDCCKPSCSWPGKADVTSPVGSCNKDGKTLADNNTQNGCVGGSSYTCNDNQPWVVSDDLAYGFAAASISGGSEATWCCACFELTFTSTAVKGKKMVVQVTNTGSDLGSNTGAHFDLQMPGGGVGIYNGCATQWGAPTDGWGARYGGVSSASDCSNLPSALQAGCKWRFGWFKNADNPTMTYKQVTCPKAITAKSGCSRK

SEQ ID NO: 21004 - protein, 87 aa, Saccharomyces cerevisiae
MVSQLFEEKAKAVNELPTKPSTDELLELYALYKQATVGDNDKEKPGIFNMKDRYKWEAWENLKGKSQEDAEKEYIALVDQLIAKYSS

SEQ ID NO: 21005 - protein, 133 aa, Saccharomyces cerevisiae
MNNKLIYRSVRFATHNSQLLLPPLVLYRRILRQHKLLPGPQREMGDQYVRNEFKLHKDIDNPLHIVGFLASWQDYLHMISNGKWKDATLSSETLEKLSPEQTVQLYELMKETQKLHQDNEIESSKDVKRNNKD

SEQ ID NO: 21006 - protein, 725 aa, Saccharomyces cerevisiae
MTLSFAHFTYLFTILLGLTNIALASDPETILVTITKTNDANGVVTTTVSPALVSTSTIVQAGTTTLYTTWCPLTVSTSSAAEISPSISYATTLSRFSTLTLSTEVCSHEACPSSSTLPTTTLSVTSKFTSYICPTCHTTAISSLSEVGTTTVVSSSAIEPSSASIISPVTSTLSSTTSSNPTTTSLSSTSTSPSSTSTSPSSTSTSSSSTSTSSSSTSTSSSSTSTSPSSTSTSSSLTSTSSSSTSTSQSSTSTSSSSTSTSPSSTSTSSSSTSTSPSSKSTSASSTSTSSYSTSTSPSLTSSSPTLASTSPSSTSISSTFTDSTSSLGSSIASSSTSVSLYSPSTPVYSVPSTSSNVATPSMTSSTVETTVSSQSSSEYITKSSISTTIPSFSMSTYFTTVSGVTTMYTTWCPYSSESETSTLTSMHETVTTDATVCTHESCMPSQTTSLITSSIKMSTKNVATSVSTSTVESSYACSTCAETSHSYSSVQTASSSSVTQQTTSTKSWVSSMTTSDEDFNKHATGKYHVTSSGTSTISTSVSEATSTSSIDSESQEQSSHLLSTSVLSSSSLSATLSSDSTILLFSSVSSLSVEQSPVTTLQISSTSEILQPTSSTAIATISASTSSLSATSISTPSTSVESTIESSSLTPTVSSIFLSSSSAPSSLQTSVTTTEVSTTSISIQYQTSSMVTISQYMGSGSQTRLPLGKLVFAIMAVACNVIFS

SEQ ID NO: 21007 - protein, 378 aa, Saccharomyces cerevisiae
MTINTKNIVVVGAGVFGVSVANHLYRELGGTYAIKLVTASNYVYFLPSAVRLTVSKDYTKSILPLKNVLDSGIEVIKDTAASFDDKEVVLGSDRAIKFDILVLATGSKWADPIGSTYTFGDNYKEYFEREASRISDADHILFLGGGFVNCELAGELLFKYLEEIRSGKKRISIIHNSDKLLPDSGLYNDTLRKNVTDYLSKNGITLYLNTVGASLDTSPKRIFLGEGSSKYIDADLIYRGVGISPNVPVNSISDLCDKKGFIQVEKNFRVKAVEAGNVFAIGDVTNFRYHGLVKRDNWVDVLTRNVISSLQEGTEASLVDADCLETGHAPSGVSLGPNAGFGQFPLPLLGTINIPSFLISRAKSKNLFSDKMEPLFKK

SEQ ID NO: 21008 - protein, 952 aa, Saccharomyces cerevisiae
MPIVRWLLLKSAVRGSSLIGKAHPCLRSIAAHPRYLSNVYSPPAGVSRSLRINVMWKQSKLTPPRFVKIMNRRPLFTETSHACAKCQKTSQLLNKTPNREILPDNVVPLHYDLTVEPDFKTFKFEGSVKIELKINNPAIDTVTLNTVDTDIHSAKIGDVTSSEIISEEEQQVTTFAFPKGTMSSFKGNAFLDIKFTGILNDNMAGFYRAKYEDKLTGETKYMATTQMEPTDARRAFPCFDEPNLKASFAITLVSDPSLTHLSNMDVKNEYVKDGKKVTLFNTTPKMSTYLVAFIVAELKYVESKNFRIPVRVYATPGNEKHGQFAADLTAKTLAFFEKTFGIQYPLPKMDNVAVHEFSAGAMENWGLVTYRVVDLLLDKDNSTLDRIQRVAEVVQHELAHQWFGNLVTMDWWEGLWLNEGFATWMSWYSCNEFQPEWKVWEQYVTDTLQHALSLDSLRSSHPIEVPVKKADEINQIFDAISYSKGASLLRMISKWLGEETFIKGVSQYLNKFKYGNAKTEDLWDALADASGKDVRSVMNIWTKKVGFPVISVSEDGNGKITFRQNRYLSTADVKPDEDKTIYPVFLALKTKNGVDSSVVLSERSKTIELEDPTFFKVNSEQSGIYITSYTDERWAKLGQQADLLSVEDRVGLVADVKTLSASGYTSTTNFLNLVSKWNNEKSFVVWDQIINSISSMKSTWLFEPKETQDALDNFTKQLISGMTHHLGWEFKSSDSFSTQRLKVTMFGAACAARDADVEKAALKMFTDYCSGNKEAIPALIKPIVFNTVARVGGAENYEKVYKIYLDPISNDEKLAALRSLGRFKEPKLLERTLGYLFDGTVLNQDIYIPMQGMRAHQEGVEALWNWVKKNWDELVKRLPPGLSMLGSVVTLGTSGFTSMQKIDEIKKFFATKSTKGFDQSLAQSLDTITSKAQWVNRDRDVVNKYLKENGYY

SEQ ID NO: 21009 - protein, 362 aa, Saccharomyces cerevisiae
MRSLNTLLLSLFVAMSSGAPLLKIREEKNSSLPSIKIFGTGGTIASKGSTSATTAGYSVGLTVNDLIEAVPSLAEKANLDYLQVSNVGSNSLNYTHLIPLYHGISEALASDDYAGAVVTHGTDTMEETAFFLDLTINSEKPVCIAGAMRPATATSADGPMNLYQAVSIAASEKSLGRGTMITLNDRIASGFWTTKMNANSLDTFRADEQGYLGYFSNDDVEFYYPPVKPNGWQFFDISNLTDPSEIPEVIILYSYQGLNPELIVKAVKDLGAKGIVLAGSGAGSWTATGSIVNEQLYEEYGIPIVHSRRTADGTVPPDDAPEYAIGSGYLNPQKSRILLQLCLYSGYGMDQIRSVFSGVYGG

SEQ ID NO: 21010 - protein, 362 aa, Saccharomyces cerevisiae; identical to SEQ ID NO: 21009

SEQ ID NO: 21011 - protein, 362 aa, Saccharomyces cerevisiae; identical to SEQ ID NO: 21009

SEQ ID NO: 21012 - protein, 362 aa, Saccharomyces cerevisiae; identical to SEQ ID NO: 21009

SEQ ID NO: 21013 - protein, 529 aa, Saccharomyces cerevisiae
MVLEYQQREGKGSSSKSMPPDSSSTTIHTCSEAQTGEDKGLLDPHLSVLELLSKTGHSPSPMGQNLVTSIDISGNHNVNDSISGSWQAIQPLDLGASFIPERCSSQTTNGSILSSSDTSEEEQELLQAPAADIINIIKQGQEGANVVSPSHPFKQLQKIISLPLPGKEKTPFNEQDDDGDEDEAFEEDSVTITKSLTSSTNSFVMPKLSLTQKNPVFRLLILGRTGSSFYQSIPKEYQSLFELPKYHDSATFPQYTGIVIIFQELREMVSLLNRIVQYSPGKPVIPICQPGQVIQVKNVLKSFLRNKLVKLLFPPVVVTNKRDLKKMFQRLQDLSLEYGEDVNEEDNDDEAIHTKSRSYCRNKKAENSKKKSPKSNKKPKRKKQKFFTSWFTWGISITIGISFGCCVTYFVTAAYEHQTVKSLSLRPSILASLLSLDSSSDTINTPATASPSSTEQFLWFDKGTLQINFHSDGFIMKSLTIIKETWGKMNTFVLHALSKPLKFLENLNKSSEFSIDESNRILALGYILL

SEQ ID NO: 21014 - protein, 529 aa, Saccharomyces cerevisiae
MVLEYQQREGKGSSSKSMPPDSSSTTIHTCSEAQTGEDKGLLDPHLSVLELLSKTGHSPSPMGQNLVTSIDISGNHNVNDSISGSWQAIQPLDLGASFIPERCSSQTTNGSILSSSDTSEEEQELLQAPAADIINIIKQGQEGANVVSPSHPFKQLQKIISLPLPGKEKTPFNEQDDDGDEDEAFEEDSVTITKSLTSSTNSFVMPKLSLTQKNPVFRLLILGRTGSSFYQSIPKEYQSLFELPKYHDSATFPQYTGIVIIFQELREMVSLLNRIVQYSQGKPVIPICQPGQVIQVKNVLKSFLRNKLVKLLFPPVVVTNKRDLKKMFQRLQDLSLEYGEDVNEEDNDDEAIHTKSRSYCRNKKAENSKKKSPKSNKKPKRKKQKFFTSWFTWGISITIGISFGCCVTYFVTAAYEHQTVKSLSLRPSILASLLSLDSSSDTINTPATASPSSTEQFLWFDKGTLQINFHSDGFIMKSLTIIKETWGKMNTFVLHALSKPLKFLENLNKSSEFSIDESNRILALGYILL

SEQ ID NO: 21015 - protein, 529 aa, Saccharomyces cerevisiae; identical to SEQ ID NO: 21014

SEQ ID NO: 21016 - protein, 529 aa, Saccharomyces cerevisiae; identical to SEQ ID NO: 21014

SEQ ID NO: 21017 - protein, 529 aa, Saccharomyces cerevisiae; identical to SEQ ID NO: 21014

SEQ ID NO: 21018 - protein, 529 aa, Saccharomyces cerevisiae; identical to SEQ ID NO: 21014

SEQ ID NO: 21019 - protein, 1713 aa, Saccharomyces cerevisiae
MFNRFNKLQAALALVLYSQSALGQYYTSSSIASNSSTAVSSTSSGSVSISSSIELTSSTSDVSSSLTELTSSFTEVSSSIAPSTSSSEVSSSITSSGSSVSGSSSITSSGSSVSSSSPYDERFNSLDLSVHVSAGFSAGVSVGLEPSATTASVTTTLSPYDERVNLIELGVYVSDMRAHLVEYLLFQAAHSTEPHPTEIAAAFLDHGDFTTRLTGISGDEVTRMITGVPWYSTRLKPAISEALAKDGIYTAIPTSTSTTSDTYISSSSPSQVTSSAEPTTVSGVTSSVEPTRSSQVTSSAEPTTVSEITSSAEPLSSSKATTSAESISSNQITISSELIVSSVITSSSEIPSSIEVLTSSGISSSVEPTSLVGPSSDESISSTESLSATSTPLAVSSTVVTSSTDSVSPNIPFSEISSSPESSTAITSGSSSATESGSSVSGSTSATESGSSASGSSSATESGSSVSGSTSATESGSASSVPSSSGSVTESGSSSSASESSITQSGTASGSSVSSTSGSVTQSGSSVSGSSASSAPGISSSIPQSTSSASTASGSITSGTLTSITSGSSSATESGSSVSGSSSATESGSSVSGSTSATESGSSVSGSTSATESGSSASGSSSATESGSSVSGSTSATESGSSVSGSTSATESGSSASGSSSATESGSASSVPSSSGSVTESGSSSSASESSITQSGTASGSSASSTSGSVTQSGSSVSGSSASSAPGISSSIPQSTSSASTASGSITSGTLTSITSGSSSATESGSSASGSSSATESGSSVSGSTSATESGSSVSGSTSATESGSSASGSSSATESGSSVSGSTSATESGSSASGSSSATESGSASSVPSSSGSVTESGSSSSASESSITQSGTASGSSASSTSGSVTQSGSSVSGSSASSTSGSVTQSGSSVSGSSASSAPGISSSIPQSTSSASTASGSITSGTLTSITSSASSASATASNSLSSSDGTIYLPTTTISGDLTLTGKVIATEGVVVAAGAKLTLLDGDKYSFSADLKVYGDLLVKKSKETYPGTEFDISGENFDVTGNFNAEESAATSASIYSFTPSSFDNSGDISLSLSKSKKGEVTFSPYSNSGAFSFSNAILNGGSVSGLQRRDDTEGSVNNGEINLDNGSTYVIVEPVSGKGTVNIISGNLYLHYPDTFTGQTVVFKGEGVLAVDPTESNTTPIPVVGYTGENQIAITADVTALSYDSATGVLTATQGNSQFSFSIGTGFSSSGFNVSEGTFAGAYAYYLNYGGVVASSATPSSTSTTSGATNSTSGSTSFGASVTGSTASTSFGASVTGSTASTLISGSPSVYTTTLTYATTTSTVVVSCSETTDSNGNVYTITTTVPCSSTTATITSCDETGCHVTTSTGTVATETVSSKSYTTVTVTHCDNNGCNTKTVTSEAPEATTTTVSPKTYTTATVTQCDDNGCSTKTVTSECPEETSATTTSPKSYTTVTVTHCDDNGCNTKTVTSEAPEATTTTVSPKTYTTATVTQCDDNGCSTKTVTSECPEETSATTTSPKSYTTVTVTHCDDNGCNTKTVTSEAPEATTTTVSPKTYTTATVTQCDDNGCSTKTVTSEAPKETSETSETSAAPKTYTTATVTQCDDNGCNVKIITSQIPEATSTVTATSASPKSYTTVTSEGSKATSLTTAISKASSAISTYSKSAAPIKTSTGIIVQSEGIAAGLNANTLNALVGIFVLAFFN

SEQ ID NO: 21020 - protein, 587 aa, Saccharomyces cerevisiae
MSAINHLCLKLILASFAIINTITALTNDGTGHLEFLLQHEEEMYYATTLDIGTPSQSLTVLFDTGSADFWVMDSSNPFCLPNSNTSSYSNATYNGEEVKPSIDCRSMSTYNEHRSSTYQYLENGRFYITYADGTFADGSWGTETVSINGIDIPNIQFGVAKYATTPVSGVLGIGFPRRESVKGYEGAPNEYYPNFPQILKSEKIIDVVAYSLFLNSPDSGTGSIVFGAIDESKFSGDLFTFPMVNEYPTIVDAPATLAMTIQGLGAQNKSSCEHETFTTTKYPVLLDSGTSLLNAPKVIADKMASFVNASYSEEEGIYILDCPVSVGDVEYNFDFGDLQISVPLSSLILSPETEGSYCGFAVQPTNDSMVLGDVFLSSAYVVFDLDNYKISLAQANWNASEVSKKLVNIQTDGSISGAKIATAEPWSTNEPFTVTSDIYSSTGCKSRPFLQSSTASSLIAETNVQSRNCSTKMPGTRSTTVLSKPTQNSAMHQSTGAVTQTSNETKLELSSTMANSGSVSLPTSNSIDKEFEHSKSQTTSDPSVAEHSTFNQTFVHETKYRPTHKTVITETVTKYSTVLINVCKPTY

SEQ ID NO: 21021 - protein, 313 aa, Saccharomyces cerevisiae
MRFSTTLATAATALFFTASQVSAIGELAFNLGVKNNDGTCKSTSDYETELQALKSYTSTVKVYAASDCNTLQNLGPAAEAEGFTIFVGVWPTDDSHYAAEKAALQTYLPKIKESTVAGFLVGSEALYRNDLTASQLSDKINDVRSVVADISDSDGKSYSGKQVGTVDSWNVLVAGYNSAVIEASDFVMANAFSYWQGQTMQNASYSFFDDIMQALQVIQSTKGSTDITFWVGETGWPTDGTNFESSYPSVDNAKQFWKEGICSMRAWGVNVIVFEAFDEDWKPNTSGTSDVEKHWGVFTSSDNLKYSLDCDFS

SEQ ID NO: 21022 - protein, 645 aa, Saccharomyces cerevisiae
MGSGDTRGESSLVAKPIEIILNKLPHAILAQQQFQKYITSPIYRYLSKLLLFREVAWPESTKDTQKGQVGIFSFQNNYADSATTFRILAHLDEQRYPLPNGAAEKNLPSLFEGFKATVSIIQQRLLLDNVDGATNSDKEKYVQLPDINTGFVNKTYSRIDLTHLLEDVETNVENLSINKTLEMDELTRLDSMINELESRKLKILERVKHIDSKSTNLENDVTLIKDRINFIEEYSLEADREQSLRKQMEEERSSEASSFTQNEEAISSLYDVESKDTRLKDFYKMPHEKSHDKNRQMHIISETYSRNSTAFRMTIPHGEHGNSITALDFDTPWGTLCSSSYQDRIVKVWDLNHGIQVGELPGHLATVNCMQIDKKNYNMLITGSKDATLKLWDLNLSRELYLDHSPLKEKTEEIVTPCIHNFELHKDEITALSFDSEALVSGSRDKKIFHWDLTTGKCIQQLDLIFTPTHSDIKMPARSLNNGTCLLGTEAPMIGALQCYNSALATGTKDGLVRLWDLRVGKPVRLLEGHTDGITSLKFDSEKLVTGSMDNSVRIWDLRTSSILDVIAYDLPVSSLDFDGKLITVGANEGGVNVFNMERDEHWMTPEPPHSLDGDELSRRIAIVKYKDGFLINGHNDGDINVWTL

SEQ ID NO: 21023 - protein, 643 aa, Saccharomyces cerevisiae
MGSGDTRGESSLVAKPIEIILNKLPHAILAQQQFQKYITSPIYRYLSKLLLFREVAWPESTKDTQKGQVGIFSFQNNYADSATTFRILAHLDEQRYPLPNGAAEKNLPSLFEGFKATVSIIQQRLLLDNVDGATNSDKEKYVQLPDINTGFVNKTYSRIDLTHLLEDVETNVENLSINKTLEMDELTRLDSMINELESRKLKILERVKHIDSKSTNLENDVTLIKDRINFIEEYNLEADREQSLRKQMEEERSSEASSFTQNEEAISSLCDVESKDTRLKDFYKMPHEKSHDKNRQIISETYSRNTTAFRMTIPHGEHGNSITALDFDTPWGTLCSSSYQDRIVKVWDLNHGIQVGELPGHLATVNCMQIDKKNYNMLITGSKDATLKLWDLNLSREIYLDHSPLKEKTEEIVTPCIHNFELHKDEITALSFDSEALVSGSRDKKIFHWDLTTGKCIQQLDLIFTPTHSDIKMPARSLNNGACLLGTEAPMIGALQCYNSALATGTKDGIVRLWDLRVGKPVRLLEGHTDGITSLKFDSEKLVTGSMDNSVRIWDLRTSSILDVIAYDLPVSSLDFDGKLITVGANEGGVNVFNMERDEHWMTPEPPHSLDGDELSRRIAIVKYKDGFLINGHNDGDINVWTL

SEQ ID NO: 21024 - protein, 249 aa, Saccharomyces cerevisiae
MTTNDTYEATYAIPMHCENCVNDIKACLKNVPGINSLNFDIEQQIMSVESSVAPSTIINTLRNCGKDAIIRGAGKPNSSAVAILETFQKYTIDQKKDTAVRGLARIVQVGENKTLFDITVNGVPEAGNYHASIHEKGDVSKGVESTGKVWHKFDEPIECFNESDLGKNLYSGKTFLSAPLPTWQLIGRSFVISKSLNHPENEPSSVKDYSFLGVIARSAGVWENNKQVCACTGKTVWEERKDALANNIK

SEQ ID NO: 21025 - protein, 133 aa, Saccharomyces cerevisiae
MQFSTVASIAAVAAVASAAANVTTATVSQESTTLVTITSCEDHVCSETVSPALVSTATVTVDDVITQYTTWCPLTTEAPKNGTSTAAPVTSTEAPKNTTSAAPTHSVTSYTGAAAKALPAAGALLAGAAALLL

SEQ ID NO: 21026 - protein, 238 aa, Saccharomyces cerevisiae
MRATTLLSSVVSLALLSKEVLATPPACLLACVAQVGKSSSTCDSLNQVTCYCEHENSAVKKCLDSICPNNDADAAYSAFKSSCSEQNASLGDSSSSASSSASSSSKASSSTKASSSSASSSTKASSSSASSSTKASSSSAAPSSSKASSTESSSSSSSSTKAPSSEESSSTYVSSSKQASSTSEAHSSSAASSTVSQETVSSALPTSTAVISTFSEGSGNVLEAGKSVFIAAVAAMLI

SEQ ID NO: 21027 - protein, 511 aa, Saccharomyces cerevisiae
MVGHSAQHRSKSSLVSHLLILLIFITIIIEMCLYNKIFKNQRSDDIRDNFNNGGHRVPSNVQNHGTHIRDEAFISGVYYSNWSPYKPRFHFPHDINLKQVSHIYYAFFKINSRTGGIENTDSWSDLEMNLYKSLAIKNSELIKESSNNSVQNILPLGCIGELFYLKNTCSDKKFKVIMSIGGWSDSENFKIIIKDDKLLQNFVDSSVETMFRLGFDGIDLDWEFPGNNESEPRGYLKLVRMLRLKLNSLESQIFGKRTEDHFQLSIAAPAFKDKLFYLPITEIDQYVDYWNMMTYDYYGSWSETTGYHSNLFSETELNGNFAMHYMIDRFGVNSRKLVLGMAAYGRSFHIKDNKFEPFNQNTVLINKIFKGVGKPTKEIDKADGKEGIWPYKNLPKIGTIEQYDPKYVSAYCFDEKNSIFISYDNTKSVKTKAEYVTHNNLGGGFWWESCGEAYANESRSLINAFNEGLHFNVSSKPSIFQDVRVKKYYLNKYGDGGFLSPYLKHLDSRKQ

SEQ ID NO: 21028 - protein, 562 aa, Saccharomyces cerevisiae
MSLLYIILLFTQFLLLPTDAFDRSANTNIAVYWGQNSAGTQESLATYCESSDADIFLLSFLNQFPTLGLNFANACSDTFSDGLLHCTQIAEDIETCQSLGKKVLLSLGGASGSYLFSDDSQAETFAQTLWDTFGEGTGASERPFDSAVVDGFDFDIENNNEVGYSALATKLRTLFAEGTKQYYLSAAPQCPYPDASVGDLLENADIDFAFIQFYNNYCSVSGQFNWDTWLTYAQTVSPNKNIKLFLGLPGSASAAGSGYISDTSLLESTIADIASSSSFGGIALWDASQAFSNELNGEPYVEILKNLLTSASQTATTTVATSKTSAASTSSASTSSASTSQKKTTQSTTSTQSKSKVTLSPTASSAIKTSITQTTKTLTSSTKTKSSLGTTTTESTLNSVAITSMKTTLSSQITSAALVTPQTTTTSIVSSAPIQTAITSTLSPATKSSSVVSLQTATTSTLSPTTTSTSSGSTSSGSTSSDSTARTLAKELNAQYAAGKLNGKSTCTEGEIACSADGKFAVCDHSAWVYMECASGTTCYAYDSGDSVYTQCNFSYLESNYF

SEQ ID NO: 21029 - protein, 225 aa, Saccharomyces cerevisiae
MQFKNVALAASVAALSATASAEGYTPGEPWSTLTPTGSISCGAAEYTTTFGIAVQAITSSKAKRDVISQIGDGQVQATSAAATDSQVQASSTATPTSSEKISSSASKTSSTNATSSSCATPSLKDSSCKNSGTLELTLKDGVLTDAKGRIGSIVANRQFQFDGPPPQAGAIYAAGWSITEDGYLALGDSDVFYQCLSGNFYNLYDQNVAEQCSAIHLEAVSLVDC

SEQ ID NO: 21030 - protein, 225 aa, Saccharomyces cerevisiae; identical to SEQ ID NO: 21029

SEQ ID NO: 21031 - protein, 227 aa, Saccharomyces cerevisiae
MQFKNVALAASVAALSATASAEGYTPGEPWSTLTPTGSISCGAAEYTTTFGIAVQAITSSKAKRDVISQIGDGQVQATSAATAQATDSQAQATTTATPTSSEKISSSASKTSTNATSSSCATPSLKDSSCKNSGTLELTLKDGVLTDAKGRIGSIVANRQFQFDGPPPQAGAIYAAGWSITEDGYLALGDSDVFYQCLSGNFYNLYDQNVAEQCSAIHLEAVSLVDC

SEQ ID NO: 21032 - protein, 73 aa, Saccharomyces cerevisiae
MSNPCQKEACAIQDCLLSHQYDDAKCAKVIDQLYICCSKFYKDNGKDSRSPCCPLPSLLELKMKQRKLTPGDS

SEQ ID NO: 21033 - protein, 74 aa, Saccharomyces cerevisiae
MSNPCQKEACAIQGYCLLSHQYDDAKCAKVIDQLYICCSKFYKDNGKDSRSPCCPLPSLLELKMKQRKLTPGDS

SEQ ID NO: 21034 - protein, 73 aa, Saccharomyces cerevisiae; identical to SEQ ID NO: 21032

SEQ ID NO: 21035 - protein, 73 aa, Saccharomyces cerevisiae; identical to SEQ ID NO: 21032

SEQ ID NO: 21036 - protein, 73 aa, Saccharomyces cerevisiae
MSNPCQKEACAIQDCLLSHQYDDAKCAKVIDQLYICCSKFYNDNGKDSRSPCCPLPSLLELKMKQRKLTPGDS

SEQ ID NO: 21037 - protein, 69 aa, Saccharomyces cerevisiae
MTETDKKQEQENHAECEDKPKPCCVCKPEKEERDTCILFNGQDSEKCKEFIEKYKECMKGYGFEVPSAN

SEQ ID NO: 21038 - protein, 98 aa, Saccharomyces cerevisiae
MSGNPGSSLSALRPTPPERGSFPLDHDGECTKYMQEYLKCMQLVQNENAMNCRLLAKDYLRCRMDHQLMDYDEWSHLGLPEDAPGNNGKTIKDATDNK

SEQ ID NO: 21039 - protein, 151 aa, Saccharomyces cerevisiae
MEKPSPTRRQTSSLSTISNGMTMTNDNRDTTNTNSGSTSSNNSQPSSSSTPPAASGPVTDRTKVNYVPKSDDPSSFQYYPDDPENPVNKYKFALKADSQYYDPCEESSKLSFQCLERNDYDRSKCQEYFDAYRECKKQWLTARRKNRQQWE

SEQ ID NO: 21040 - protein, 507 aa, Saccharomyces cerevisiae
MKVLDLLTVLSASSLLSTFAAAESTATADSTTAASSTASCNPLKTTGCTPDTALATSFSEDFSSSSKWFTDLKHAGEIKYGSDGLSMTLAKRYDNPSLKSNFYIMYGKLEVILKAANGTGIVSSFYLQSDDLDEIDIEWVGGDNTQFQSNFFSKGDTTTYDRGEFHGVDTPTDKFHNYTLDWAMDKTTWYLDGESVRVLSNTSSEGYPQSPMYLMMGIWAGGDPDNAAGTIEWAGGETNYNDAPFTMYIEKVIVTDYSTGKKYTYGDQSGSWESIEADGGSIYGRYDQAQEDFAVLANGGSISSSSTSSSTVSSSASSTVSSSVSSTVSSSASSTVSSSVSSTVSSSSSVSSSSSTSPSSSTATSSKTLASSSVTTSSSISSFEKQSSSSSKKTVASSSTSESIISSTKTPATVSSTTRSTVAPTTQQSSVSSDSPVQDKGGVATSSNDVTSSTTQISSKYTSTIQSSSSEASSTNSVQISNGADLAQSLPREGKLFSVLVALLALL

SEQ ID NO: 21041 - protein, 467 aa, Saccharomyces cerevisiae
MAIVNSWLICLVSIFSFVVRVEAATFCNATQACPEDKPCCSQYGECGTGQYCLNNCDVRYSFSHDSCMPVPICKSSSTKFKDYSSKLGNANTFLGNVSEADWLYTGDVLDYDDEESLILAMPKNSGGTVLSSTRAVWYGKVSARIKTSHLAGVVTGFILYSGAGDELDYEFVGADLETAQTNFYWESVLNYTNSANISTTDTFENYHTYELDWHEDYVTWSIDGVVGRTLYKNETYNATTQKYQYPQTPSKVDISIWPGGNSTNAPGTIAWSGGEINWDASDISNPGYYYAIVNEVNITCYDPPSDTKKNGTSAYVYTSSSEFLAKDIAITDDEVMMDSDEGSGLDPHKGATTSSTQKSSSSTATSSSKTSSDHSSSTKKSSKTSSTASSSSSSSSSSSSSSSTATKNGDKVVSSVSSSVTSQTQTTSSVSGSASSSTSSMSGNNAGANVAANWRLTVLCVILGYVL

SEQ ID NO: 21042 - protein, 239 aa, Saccharomyces cerevisiae
MKFSTALSVALFALAKMVIADSEEFGLVSIRSGSDLQYLSVYSDNGTLKLGSGSGSFEATITDDGKLKFDDDKYAVVNEDGSFKEGSESDAATGFSIKDGHLNYKSSSGFYAIKDGSSYIFSSKQSDDATGVAIRPTSKSGSVAADFSPSDSSSSSSASASSASASSSTKHSSSIESVETSTTVETSSASSPTASVISQITDGQIQAPNTVYEQTENAGAKAAVGMGAGALAVAAAYLL

SEQ ID NO: 21043 - protein, 92 aa, Saccharomyces cerevisiae
MQFSTVASVAFVALANFVAAESAAAISQITDGQIQATTTATTEATTTAAPSSTVETVSPSSTETISQQTENGAAKAAVGMGAGALAAAAMLL

SEQ ID NO: 21044 - protein, 591 aa, Saccharomyces cerevisiae
MLKYKPLLKISKNCEAAILRASKTRLNTIRAYGSTVPKSKSFEQDSRKRTQSWTALRVGAILAATSSVAYLNWHNGQIDNEPKLDMNKQKISPAEVAKHNKPDDCWVVINGYVYDLTRFLPNHPGGQDVIKFNAGKDVTAIFEPLHAPNVIDKYIAPEKKLGPLQGSMPPELVCPPYAPGETKEDIARKEQLKSLLPPLDNIINLYDFEYLASQTLTKQAWAYYSSGANDEVTHRENHNAYHRIFFKPKILVDVRKVDISTDMLGSHVDVPFYVSATALCKLGNPLEGEKDVARGCGQGVTKVPQMISTLASCSPEEIIEAAPSDKQIQWYQLYVNSDRKITDDLVKNVEKLGVKALFVTVDAPSLGQREKDMKLKFSNTKAGPKAMKKTNVEESQGASRALSKFIDPSLTWKDIEELKKKTKLPIVIKGVQRTEDVIKAAEIGVSGVVLSNHGGRQLDFSRAPIEVLAETMPILEQRNLKDKLEVFVDGGVRRGTDVLKALCLGAKGVGLGRPFLYANSCYGRNGVEKAIEILRDEIEMSMRLLGVTSIAELKPDLLDLSTLKARTVGVPNDVLYNEVYEGPTLTEFEDA

SEQ ID NO: 21045 - protein, 109 aa, Saccharomyces cerevisiae
MTEFKAGSAKKGATLFKTRCLQCHTVEKGGPHKVGPNLHGIFGRHSGQAEGYSYTDANIKKNVLWDENNMSEYLTNPKKYIPGTKMAFGGLKKEKDRNDLITYLKKACE

SEQ ID NO: 21046 - protein, 113 aa, Saccharomyces cerevisiae
MAKESTGFKPGSAKKGATLFKTRCQQCHTIEEGGPNKVGPNLHGIFGRHSGQVKGYSYTDANINKNVKWDEDSMSEYLTNPKKYIPGTKMAFAGLKKEKDRNDLITYMTKAAK

SEQ ID NO: 21047 - protein, 989 aa, Saccharomyces cerevisiae
MLRFQRFASSYAQAQAVRKYPVGGIFHGYEVRRILPVPELRLTAVDLVHSQTGAEHLHIDRDDKNNVFSIAFKTNPPDSTGVPHILEHTTLCGSVKYPVRDPFFKMLNKSLANFMNAMTGPDYTFFPFSTTNPQDFANLRGVYLDSTLNPLLKQEDFDQEGWRLEHKNITDPESNIVFKGVVYNEMKGQISNANYYFWSKFQQSIYPSLNNSGGDPMKITDLRYGDLLDFHHKNYHPSNAKTFTYGNLPLVDTLKQLNEQFSGYGKRARKDKLLMPIDLKKDIDVKLLGQIDTMLPPEKQTKASMTWICGAPQDTYDTFLLKVLGNLLMDGHSSVMYQKLIESGIGLEFSVNSGVEPTTAVNLLTVGIQGVSDIEIFKDTVNNIFQNLLETEHPFDRKRIDAIIEQLELSKKDQKADFGLQLLYSILPGWTNKIDPFESLLFEDVLQRFRGDLETKGDTLFQDLIRKYIVHKPCFTFSIQGSEEFSKSLDDEEQTRLREKITALDEQDKKNIFKRGILLQEKQNEKEDLSCLPTLQIKDIPRAGDKYSIEQKNNTMSRITDTNGITYVRGKRLLNDIIPFELFPYLPLFAESLTNLGTTTESFSEIEDQIKLHTGGISTHVEVTSDPNTTEPRLIFGFDGWSLNSKTDHIFEFWSKILLETDFHKNSDKLKVLIRLLASSNTSSVADAGHAFARGYSAAHYRSSGAINETLNGIEQLQFINRLHSLLDNEETFQREVVDKLTELQKYIVDTNNMNFFITSDSDVQAKTVESQISKFMERLPHGSCLPNGPKTSDYPLIGSKCKHTLIKFPFQVHYTSQALLGVPYTHKDGSALQVMSNMLTFKHLHREVREKGGAYGGGASYSALAGIFSFYSYRDPQPLKSLETFKNSGRYILNDAKWGVTDLDEAKLTIFQQVDAPKSPKGEGVTYFMSGVTDDMKQARREQLLDVSLLDVHRVAEKYLLNKEGVSTVIGPGIEGKTVSPNWEVKEL

SEQ ID NO: 21048 - protein, 205 aa, Saccharomyces cerevisiae
MKFSGLWCWLLLFLSVNVIASDVGELIDQDDEVITQKVFFDIEHGEEKVGRIVIGLYGKVCPKTAKNFYKLSTTTNSKKGFIGSTFHRVIPNFMVQGGDFTDGTGVGGKSIYGDTFPDENFTLKHDRKGRLSMANRGKDTNGSQFFITTTEEASWLDGKHVVFGQVVDGMDVVNYIQHVSRDANDKPLEAVKIAKCGEWTPELSS

SEQ ID NO: 21049 - protein, 298 aa, Saccharomyces cerevisiae
MSRISILAVAAALVASATAASVTTTLSPYDERVNLIELAVYVSDIGAHLSEYYAFQALHKTETYPPEIAKAVFAGGDFTTMLTGISGDEVTRMITGVPWYSTRLMGAISEALANEGIATAVPASTTEASSTSTSEASSAATESSSSSESSAETSSNAASTQATVSSESSSAASTIASSAESSVASSVASSVASSASFANTTAPVSSTSSISVTPVVQNGTDSTVTKTQASTVETTITSCSNNVCSTVTKPVSSKAQSTATSVTSSASRVIDVTTNGANKFNNGVFGAAAIAGAAALLL

SEQ ID NO: 21050 - protein, 1161 aa, Saccharomyces cerevisiae
MVNISIVAGIVALATSAAAITATTTLSPYDERVNLIELAVYVSDIRAHIFQYYSFRNHHKTETYPSEIAAAVFDYGDFTTRLTGISGDEVTRMITGVPWYSTRLKPAISSALSKDGIYTAIPTSTSTTTTKSSTSTTPTTTITSTTSTTSTTPTTSTTSTTPTTSTTSTTPTTSTTSTTPTTSTTSTTPTTSTTSTTPTTSTTSTTPTTSTTSTTPTTSTTSTTPTTSTTPTTSTTSTTSQTSTKSTTPTTSSTSTTPTTSTTPTTSTTSTAPTTSTTSTTSTTSTISTAPTTSTTSSTFSTSSASASSVISTTATTSTTFASLTTPATSTASTDHTTSSVSTTNAFTTSATTTTTSDTYISSSSPSQVTSSAEPTTVSEVTSSVEPTRSSQVTSSAEPTTVSEFTSSVEPTRSSQVTSSAEPTTVSEFTSSVEPTRSSQVTSSAEPTTVSEFTSSVEPTRSSQVTSSAEPTTVSEFTSSVEPTRSSQVTSSAEPTTVSEFTSSVEPIRSSQVTSSAEPTTVSEVTSSVEPIRSSQVTTTEPVSSFGSTFSEITSSAEPLSFSKATTSAESISSNQITISSELIVSSVITSSSEIPSSIEVLTSSGISSSVEPTSLVGPSSDESISSTESLSATSTFTSAVVSSSKAADFFTRSTVSAKSDVSGNSSTQSTTFFATPSTPLAVSSTVVTSSTDSVSPNIPFSEISSSPESSTAITSTSTSFIAERTSSLYLSSSNMSSFTLSTFTVSQSIVSSFSMEPTSSVASFASSSPLLVSSRSNCSDARSSNTISSGLFSTIENVRNATSTFTNLSTDEIVITSCKSSCTNEDSVLTKTQVSTVETTITSCSGGICTTLMSPVTTINAKANTLTTTETSTVETTITTCPGGVCSTLTVPVTTITSEATTTATISCEDNEEDITSTETELLTLETTITSCSGGICTTLMSPVTTINAKANTLTTTETSTVETTITTCSGGVCSTLTVPVTTITSEATTTATISCEDNEEDVASTKTELLTMETTITSCSGGICTTLMSPVSSFNSKATTSNNAESTIPKAIKVSCSAGACTTLTTVDAGISMFTRTGLSITQTTVTNCSGGTCTMLTAPIATATSKVISPIPKASSATSIAHSSASYTVSINTNGAYNFDKDNIFGTAIVAVVALLLL

SEQ ID NO: 21051 - protein, 757 aa, Saccharomyces cerevisiae
MASLEDLIPTVNKLQDVMYDSGIDTLDLPILAVVGSQSSGKSSILETLVGRDFLPRGTGIVTRRPLVLQLNNISPNSPLIEEDDNSVNPHDEVTKISGFEAGTKPLEYRGKERNHADEWGEFLHIPGKRFYDFDDIKREIENETARIAGKDKGISKIPINLKVFSPHVLNLTLVDLPGITKVPIGEQPPDIEKQIKNLILDYIATPNCLILAVSPANVDLVNSESLKLAREVDPQGKRTIGVITKLDLMDSGTNALDILSGKMYPLKLGFVGVVNRSQQDIQLNKTVEESLDKEEDYFRKHPVYRTISTKCGTRYLAKLLNQTLLSHIRDKLPDIKTKLNTLISQTEQELARYGGVGATTNESRASLVLQLMNKFSTNFISSIDGTSSDINTKELCGGARIYYIYNNVFGNSLKSIDPTSNLSVLDVRTAIRNSTGPRPTLFVPELAFDLLVKPQIKLLLEPSQRCVELVYEELMKICHKCGSAELARYPKLKSMLIEVISELLRERLQPTRSYVESLIDIHRAYINTNHPNFLSATEAMDDIMKTRRKRNQELLKSKLSQQENGQTNGINGTSSISSNIDQDSAKNSDYDDDGIDAESKQTKDKFLNYFFGKDKKGQPVFDASDKKRSIAGDGNIEDFRNLQISDFSLGDIDDLENAEPPLTEREELECELIKRLIVSYFDIIREMIEDQVPKAVMCLLVNYCKDSVQNRLVTKLYKETLFEELLVEDQTLAQDRELCVKSLGVYKKAATLISNIL

SEQ ID NO: 21052 - protein, 348 aa, Saccharomyces cerevisiae
MSQYKTGLLLIHPAVTTTPELVENTKAQAASKKVKFVDQFLINKLNDGSITLENAKYETVHYLTPEAQTDIKFPKKLISVLADSLKPNGSLIGLSDIYKVDALINGFEIINEPDYCWIKMDSSKLNQTVSIPLKKKKTNNTKLQSGSKLPTFKKASSSTSNLPSFKKADHSRQPIVKETDSFKPPSFKMATEPKVYRVVDDLIEDSDDDDFSSDSSKAQYFDQVDTSDDSIEEEELIDEDGSGKSMITMITCGKSKTKKKKACKDCTCGMKEQEGKEINDIRSQQDKVVKFTEDELTEIDFTIDGKKVGGCGSCSLGDAFRCSGCPYLGLPAFKPGQPINLDSISDDL

SEQ ID NO: 21053 - protein, 348 aa, Saccharomyces cerevisiae
MSQYKTGLLLIHPAVTTTPELVENTKAQAASKKVKFVDQFLINKLNDGSITLENAKYETVHYLTPEAQTDIKFPKKLISVLADSLKPNGSLIGLSDIYKVDALINGFEIINEPDYCWIKMDSSKLNQTVSIPLKKKKTNNTKLQSGSKLPTFKKASSSTSNLPSFKKADHSRQPIVKETDSFKPPSFKMTTEPKVYRVVDDLIEDSDDDDFSSDSSKAQYFDQVDTSDDSIEEEELIDEDGSGKSMITMITCGKSKTKKKKACKDCTCGMKEQEENEINDIRSQQDKVVKFTEDELTEIDFTIDGKKVGGCGSCSLGDAFRCSGCPYLGLPAFKPGQPINLDSISDDL

SEQ ID NO: 21054 - protein, 348 aa, Saccharomyces cerevisiae; identical to SEQ ID NO: 21052

SEQ ID NO: 21055 - protein, 348 aa, Saccharomyces cerevisiae; identical to SEQ ID NO: 21052

SEQ ID NO: 21056 - protein, 348 aa, Saccharomyces cerevisiae; identical to SEQ ID NO: 21053

SEQ ID NO: 21057 - protein, 325 aa, Saccharomyces cerevisiae
MKFNFSTIFNILFFLFTLIEANSNGETVKLITSDGIVYSYAVYTKTLAPARVVVKTISYTTTRVYPITLANSVVSSTTEKITEVSTVSASEQVSATQTNSLVSTSTVSTISPTISSGSSTSSSSTYDIESSQSIESSGTSSATAEPSASSGFRLTSSSAFVSSTAPFSSQLSSSSSSETSSSSFSTSSSSAPLSLTSSSSSSSSFATIITLAPSSSKSGNSQLTLASSSSTSAVESSQTGSTIARTTSTLVPSSSVDTTSRATTSMPLESSSTQSISVSSSDGTCYVFYDDDDYYSTVYLTNPSQSVDAATTITSTNTIYATVTI

SEQ ID NO: 21058 - protein, 430 aa, Saccharomyces cerevisiae
MQFKNALTATAILSASALAGTNSTTSIPSSCSIGTSATATAQADLDKISGCSTIVGNLTITGDLGSAALASIQEIDGSLTIFNSSSLSSFSADSIKKITGDLNMQELIILTSASFGSLQEVDSINMVTLPAISTFSTDLQNANNIIVSDTTLESVEGFSTLKKVNVFNINNNRYLNSFQSSLESVSDSLQFSSNGDNTTLAFDNLVWANNITLRDVNSISFGSLQTVNASLGFINNTLPSLNLTQLSKVGQSLSIVSNDELSKAAFSNLTTVGGGFIIANNTQLKVIDGFNKVQTVGGAIEVTGNFSTLDLSSLKSVRGGANFDSSSSNFSCNALKKLQSNGAIQGDSFVCKNGATSTSVKLSSTSTESSKSSATSSASSSGDASNAQASVSASASSSSSSSKKSKGAAPELVPATSFMGVVAAVAVALL

SEQ ID NO: 21059 - protein, 429 aa, Saccharomyces cerevisiae
MQFKNALTATAILSASALAANSSTSIPSSCSIGTSATATAQADLDKISGCSTIVGNLTITGDLGSAALASIQEIDGSLTIFNSSSLSSFSADSIKKITGDLNMQELIILTSASFGSLQEVDSINMVTLPAISTFSTDLQNANNIIVSDTTLESVEGFSTLKKVNVFNINNNRYLNSFQSSLESVSDSLQFSSNGDNTTLAFDNLVWANNITLRDVNSISFGSLQTVNASLGFINNTLPSLNLTQLSKVGQSLSIVSNDELSKAAFSNLTTVGGGFIIANNTQLKVIDGFNKVQTVGGAIEFTGNFSTLDLSSLKSVRGGAKFDSSSSNFSCNALKKLQSNGAIQGDSFVCKNGATSTSVKLSSTSTESSKSSATSSASSSGDASNAQANVSASASSSSSSSKKSKGAAPELVPATSFMGVVAAVAVALL

SEQ ID NO: 21060 - protein, 429 aa, Saccharomyces cerevisiae
MQFKNALTATAILSASALAANSTTSIPSSCSIGTSATATAQADLDKISGCSTIVGNLTITGDLGSAALASIQEIDGSLTIFNSSSLSSFSADSIKKITGDLNMQELIILTSASFGSLQEVDSINMVTLPAISTFSTDLQNANNIIVSDTTLESVEGFSTLKKVNVFNINNNRYLNSFQSSLESVSDSLQFSSNGDNTTLAFDNLVWANNITLRDVNSISFGSLQTVNASLGFINNTLPSLNLTQLSKVGQSLSIVSNDELSKAAFSNLTTVGGGFIIANNTQLKVIDGFNKVQTVGGAIEVTGNFSTLDLSSLKSVRGGANFDSSSSNFSCNALKKLQSNGAIQGDSFVCKNGATSTSVKLSSTSTESSKSSATSSASSSGDASNAQASVSASASSSSSSSKKSKGAAPELVPATSFMGVVAAVAVALL

SEQ ID NO: 21061 - protein, 429 aa, Saccharomyces cerevisiae
MQFKNALTATAILSASALAANSTTSIPSSCSIGTSATATAQADLDKISGCSTIVGNLTITGDLGSAALASIQEIDGSLTIFNSSSLSSFSADSIKKITGDLNMQELIILTSASFGSLQEVDSINMVTLPAISTFSTDLQNANNIIVSDTTLESVEGFSTLKKVNVFNINNNRYLNSFQSSLESVSDSLQFSSNGDNTTLAFDNLVWANNITLRDVNSISFGSLQTVNASLGFINNTLPSLNLTQLSKVGQSLSIVSNDELSKAAFSNLTTVGGGFIIANNTQLKVIDGFNKVQTVGGAIEVTGNFSTLDLSSLKSVRGGANFDSSSSNFSCNALKKLQSNGAIQGDSFVCKNGATSTSVKLSSTSTESSKSSATSSASSSGDASNAQANVSASASSSSSSSKKSKGAAPELVPATSFMGVVAAVGVALL

SEQ ID NO: 21062 - protein, 1041 aa, Saccharomyces cerevisiae
MNKLLLHLVRVISILGLANALTQTQPILKDIQITDSYTKTKECTDPDHWFIIEGQLSIPKGSQQNITFQVPDAFSSFPQEPFSIKHNSNSVATISRPDKSTNNFTISIPEKSSEDITTTFNFLAQLTSDAKSKVTEPKSIVYSFYSENTMFNDVIDYVAKNTSAITTDGGIYKTNNTAWFTVDLPMRTFRNPVYLTSQTSSSSDYVFDTSLTKFEVVTAVDSFNEPINAIPYTTVHDYSTEDEIRCLFNSTISGGLYFRVTYFTKKLSTSSISNTVELTYPDEGTSVRLLGKRDTSTTLASELYSESAANIDSTTSDDTTSSDAAITPTYSNSTLSSYTSQSSAIPEVAVTASLSSGILSSTVDGASTSADASMSAVSTVSSSSEQASSSSISLSAPSSSNSTFTTPSSSLSATETYSIISSASISVTQASYIDNSTTTAVTQSTSTIAVSSAEKLSSTLSYTSNVTISVSSATQHTTTPSYVSNSTTLSSSSVLESVISSPYLANTTVSGASSASQSTNPPYVSNSTTSSATQLATIAPFAINITGTSISSSITNTSSVSSTTSSLSSGPFVSNTTVASGSYILTTTTESAQLTEIGSLIPISTITTSTTTSGTDKTGSNKVASSTEIAQSIVNNSSLSVSTINTNAATAAANARNATFTHATHSGSLQPSYHSSSLLSSTIDTKVTTATTSTSRDGSSSLAFTTGLNQSVVTGTDKSDTYSVISSTESAQVTEYDSLLPISTLKPTVVTGTSRNSTFSMVSSTKLTEATATDKGDAYSVISSTQSAQVTEYGSMLPISTLETPTVIMSTDESGYFTLTTCTESGQATEYGSLIPISTLDGSVIYTFTGESVVVGYSTTVGAAQYAQHTSLVPVSTIKGSKTSLSTEESVVAGYSTTVGAAQYAQHTSLVPVSTIKGSKTSLSTEESVVAGYSTTVDSAQYAEHTNLVAIDTLKTSTFQKATATEVCVTCTALSSPHSATLDAGTTISLPTSSSTSLSTIITWYSSSTIKPPSISTYSGAAGQLTIRIGSLLLGLISFLL

SEQ ID NO: 21063 - protein, 1117 aa, Saccharomyces cerevisiae
MQLYLTLLFLLSFVECSYISFISNNADEILETDLIETLSYATLTVGEPYVAQSVVVTRVSAASHSPLSVSPKNRVSASPINSQDSDSNTRTAVQLSLSLSNYASQVSQKISAQTNNDPVTVSNIYANDNSKSKSSVHNLSSVSGVASVMPSASTMRKVTTLLSQTASTSTSTLFSSSLSISGTQLNGTLLTSVSKGTIDPLVTQMPSYSSQETKIIPSSLTSNKTIYTISVRTNAATATGEDSFIASTPASSTLFYPSNSTQDLVQTLASTTASPAYPSNRTQITLSPSVSLYSTTSPIYPSNITENGSSPSPSLSSTVSPVYPSSSTGNILLSSLFSTVDSSSSPVSSTLDTIYVSSSMQATISSSSSSRQTKTSSSSLSTSTSSTATTTENSSTTTIVNLFNAVSTDEPPTVFDRSPNPMSLADGVSNDGPIQTNKFYTNLIVGSQESPAFVYPYSLWKYTSSSYGFAVQHTTVDQYSYGGYDSSGNAEYLVNPLGIAHVVFSASNFDSSMTMQVDEMTLSSTRVVLSESNDSSNYLEIPLVQGMGFATGIYHGSLNAKIGSSVGFNTIVSESSSNLAQGILKYRITLLNGVTWLCYVIGPDDLTSTDFSLEVSSEYEIKASASVDGLIIQLAVAPSETDYEVFYDQAAGMYVTNFKLQGVSDGSTATYEFSYTTQGESASGSTMIFALPHHESSFSDIMQDYYTGIQLASTTKGVMNGYLTTSLQFSTSLNRQISWLPWSSQLGSNLLEYSKEQLQLLAEVANSELQVSISESISGLNTYYLGKVIDKYSYILLTVSEIIQDEASTKSTLENIKSAFDILLQNEQTYPLIYDTKFNGLVSSGDWGSTSTQYDFGNTYYNDHHFHYGYIIHAAAVIGYVDSKLNGTWAADNKDWVNSLVRDVANPSEKDEYFAQSRMFDWFNGHSWAAGLYENGNGKNEESSSEDYNFAYAMKLWGATIGDQSMELRGDLMISIMKDAMNDYFYYQNDNTVEPEEIIGNKVSGILFDNIIDYTTYFGTNTEYIHGIHMLPITPVSSNIRSETFVEEEWQTKIEPIIESIESGWTGILKLNQALFDPVDSYAFFSDSTFDSSTYLDNGMSRTWALAFSGGLANSIA

SEQ ID NO: 21064 - protein, 189 aa, Saccharomyces cerevisiae
MKAIDKMTDNPPQEGLSGRKIIYDEDGKPCRSCNTLLDFQYVTGKISNGLKNLSSNGKLAGTGALTGEASELMPGSRTYRKVDPPDVEQLGRSSWTLLHSVAASYPAQPTDQQKGEMKQFLNIFSHIYPCNWCAKDFEKYIRENAPQVESREELGRWMCEAHNKVNKKLRKPKFDCNFWEKRWKDGWDE

SEQ ID NO: 21065 - protein, 448 aa, Saccharomyces cerevisiae
MLSLKTLLCTLLTVSSVLATPVPARDPSSIQFVHEENKKRYYDYDHGSLGEPIRGVNIGGWLLLEPYITPSLFEAFRTNDDNDEGIPVDEYHFCQYLGKDLAKSRLQSHWSTFYQEQDFANIASQGFNLVRIPIGYWAFQTLDDDPYVSGLQESYLDQAIGWARNNSLKVWVDLHGAAGSQNGFDNSGLRDSYKFLEDSNLAVTTNVLNYILKKYSAEEYLDTVIGIELINEPLGPVLDMDKMKNDYLAPAYEYLRNNIKSDQVIIIHDAFQPYNYWDDFMTENDGYWGVTIDHHHYQVFASDQLERSIDEHIKVACEWGTGVLNESHWTVCGEFAAALTDCTKWLNSVGFGARYDGSWVNGDQTSSYIGSCANNDDIAYWSDERKENTRRYVEAQLDAFEMRGGWIIWCYKTESSLEWDAQRLMFNGLFPQPLTDRKYPNQCGTISN

SEQ ID NO: 21066 - protein, 1609 aa, Saccharomyces cerevisiae
MNSFASLGLIYSVVNLLTRVEAQIVFYQNSSTSLPVPTLVSTSIADFHESSSTGEVQYSSSYSYVQPSIDSFTSSSFLTSFEAPTETSSSYAVSSSLITSDTFSSYSDIFDEETSSLISTSAASSEKASSTLSSTAQPHRTSHSSSSFELPVTAPSSSSLPSSTSLTFTSVNPSQSWTSFNSEKSSALSSTIDFTSSEISGSTSPKSLESFDTTGTITSSYSPSPSSKNSNQTSLLSPLEPLSSSSGDLILSSTIQATTNDQTSKTIPTLVDATSSLPPTLRSSSMAPTSGSDSISHNFTSPPSKTSGNYDVLTSNSIDPSLFTTTSEYSSTQLSSLNRASKSETVNFTASIASTPFGTDSATSLIDPISSVGSTASSFVGISTANFSTQGNSNYVPESTASGSSQYQDWSSSSLPLSQTTWVVINTTNTQGSVTSTTSPAYVSTATKTVDGVITEYVTWCPLTQTKSQAIGVSSSISSVPQASSFSGSSILSSNSSTLAASNNVPESTASGSSQYQDWSSSSLPLSQTTWVVINTTNTQGSVTSTTSPAYVSTATKTVDGVITEYVTWCPLTQTKSQAIGISSSTISATQTSKPSSILTLGISTLQLSDATFKGTETINTHLMTESTSITEPTYFSGTSDSFYLCTSEVNLASSLSSYPNFSSSEGSTATITNSTVTFGSTSKYPSTSVSNPTEASQHVSSSVNSLTDFTSNSTETIAVISNIHKTSSNKDYSLTTTQLKTSGMQTLVLSTVTTTVNGAATEYTTWCPASSIAYTTSISYKTLVLTTEVCSHSECTPTVITSVTATSSTIPLLSTSSSTVLSSTVSEGAKNPAASEVTINTQVSATSEATSTSTQVSATSATATASESSTTSQVSTASETISTLGTQNFTTTGSLLFPALSTEMINTTVVSRKTLIISTEVCSHSKCVPTVITEVVTSKGTPSNGHSSQTLQTEAVEVTLSSHQTVTMSTEVCSNSICTPTVITSVQMRSTPFPYLTSSTSSSSLASTKKSSLEASSEMSTFSVSTQSLPLAFTSSEKRSTTSVSQWSNTVLTNTIMSSSSNVISTNEKPSSTTSPYNFSSGYSLPSSSTPSQYSLSTATTTINGIKTVYTTWCPLAEKSTVAASSQSSRSVDRFVSSSKPSSSLSQTSIQYTLSTATTTISGLKTVYTTWCPLTSKSTLGATTQTSSTAKVRITSASSATSTSISLSTSTESESSSGYLSKGVCSGTECTQDVPTQSSSPASTLAYSPSVSTSSSSSFSTTTASTLTSTHTSVPLLPSSSSISASSPSSTSLLSTSLPSPAFTSSTLPTATAVSSSTFIASSLPLSSKSSLSLSPVSSSILMSQFSSSSSSSSSLASLPSLSISPTVDTVSVLQPTTSIATLTCTDSQCQQEVSTICNGSNCDDVTSTATTPPSTVTDTMTCTGSECQKTTSSSCDGYSCKVSETYKSSATISACSGEGCQASATSELNSQYVTMTSVITPSAITTTSVEVHSTESTISITTVKPVTYTSSDTNGELITITSSSQTVIPSVTTIITRTKVAITSAPKPTTTTYVEQRLSSSGIATSFVAAASSTWITTPIVSTYAGSASKFLCSKFFMIMVMVINFI

SEQ ID NO: 21067 - protein, 155 aa, Saccharomyces cerevisiae
MTKVDFWPTLKDAYEPLYPQQLEILRQQVVSEGGPTATIQSRFNYAWGLIKSTDVNDERLGVKILTDIYKEAESRRRECLYYLTIGCYKLGEYSMAKRYVDTLFEHERNNKQVGALKSMVEDKIQKETLKGVVVAGGVLAGAVAVASFFLRNKRR

SEQ ID NO: 21068 - protein, 528 aa, Saccharomyces cerevisiae
MKLSSAFVLSAITVAALGESITTTITATKNGHVYTKTVTQDATFVWAGEGAAVTSAVTEASTVAATSAAAETSVAAETSIVEPSTSAQGTSADEGSGSSITTTITATKNGHVYTKTVTQDATFVWTGEGERAPASTVATVETSVAAETSVAEPSTSAQGTSADEGSGSSITTTITATKNGHVYTKTVTQDATFVWTGEGERAPVSTVATVETAASPVTSVAEPSASTDEGSGSSITTTITATKNGHVYTKTVTQDATFVWTGEGERAPASTVATSSISAIEIPSTTEASIVEASSAVETSSAAETSSAVETSSAVETSSAVETSSAAETSSAAETSSAVETSSAVEISSAVETSAVETSSSSSTIETTSVKSLSPTQTSLSSSVQASSPIETSSAAKTSSVVPTFSSTTTENSSNSKSTSAVVASTTTSSESSATIVTPTRIGQAYTESSSRDAQSVRTHESNNWSSSSSASTKMVSSITRVQTTTAGIFTNGKSSTTPQIVNYTGAADSIAAGTGLMGAALAAVIFL

SEQ ID NO: 21069 - protein, 153 aa, Saccharomyces cerevisiae
MKFSTIFGATTVMTAVSAAAVSSVMTTKTITATNGNNVYTKVVTDTADPIISYSTTRTVVVSNSDATYTKVVTEGPDTTSEKSTTKTLTLTNGSGSSTNLYTKTVTQAVESSTSSSSSSSSSSSSASSSGAAPAAFQGASVGALALGLISYLL

SEQ ID NO: 21070 - protein, 204 aa, Saccharomyces cerevisiae
MKFSSALVLSAVAATALAESITTTITATKNGHVYTKTVTQDATFVWGGEDSYASSTSAAESSAAETSAAETSAAATTSAAATTSAAETSSAAETSSADEGSGSSITTTITATKNGHVYTKTVTQDATFVWTGEGSSNTWSPSSTSTSSEAATSSASTTATTTAETSSSATSSSTAELSSYTGAADAITAGTGLMGAALAAVMLL

SEQ ID NO: 21071 - protein, 1169 aa, Saccharomyces cerevisiae
MPVAARYIFLTGLFLLSVANVALGTTEACLPAGEKKNGMTINFYQYSLKDSSTYSNPSYMAYGYADAEKLGSVSGQTKLSIDYSIPCNGASDTCACSDDDATEYSASQVVPVKRGVKLCSDNTTLSSKTEKRENDDCDQGAAYWSSDLFGFYTTPTNVTVEMTGYFLPPKTGTYTFGFATVDDSAILSVGGNVAFECCKQEQPPITSTDFTINGIKPWNADAPTDIKGSTYMYAGYYYPIKIVYSNAVSWGTLPVSVVLPDGTEVNDDFEGYVFSFDDNATQAHCSVPNPAEHARTCVSSATSSWSSSEVCTECTETESTSYVTPYVTSSSWSSSEVCTECTETESTSTSTPYVTSSSSSSSEVCTECTETESTSYVTPYVSSSTAAANYTSSFSSSSEVCTECTETESTSTSTPYVTSSSWSSSEVCTECTETESTSYVTPYVSSSTAAANYTSSFSSSSEVCTECTETESTSTSTPYVTSSSSSSSEVCTECTETESTSYVTPYVSSSTAAANYTSSFSSSSEVCTECTETESTSTSTPYVTSSSWSSSEVCTECTETESTSYVTPYVSSSTAAANYTSSFSSSSEVCTECTETESTSTSTPYATSSTGTATSFTASTSNTMTSLVQTDTTVSFSLSSTVSEHTNAPTSSVESNASTFISSNKGSVKSYVTSSIHSITPMYPSNQTVTSSSVVSTPITSESSESSASVTILPSTITSEFKPSTMKTKVVSISSSPTNLITSYDTTSKDSTVGSSTSSVSLISSISLPSSYSASSEQIFHSSIVSSNGQALTSFSSTKVSSSESSESHRTSPTTSSESGIKSSGVEIESTSTSSFSFHETSTASTSVQISSQFVTPSSPISTVAPRSTGLNSQTESTNSSKETMSSENSASVMPSSSATSPKTGKVTSDETSSGFSRDRTTVYRMTSETPSTNEQTTLITVSSCESNSCSNTVSSAVVSTATTTINGITTEYTTWCPLSATELTTVSKLESEEKTTLITVTSCESGVCSETASPAIVSTATATVNDVVTVYSTWSPQATNKLAVSSDIENSASKASFVSEAAETKSISRNNNFVPTSGTTSIETHTTTTSNASENSDNVSASEAVSSKSVTNPVLISVSQQPRGTPASSMIGSSTASLEMSSYLGIANHLLTNSGISIFIASLLLAIV

SEQ ID NO: 21072 - protein, 1537 aa, Saccharomyces cerevisiae
MTMPHRYMFLAVFTLLALTSVASGATEACLPAGQRKSGMNINFYQYSLKDSSTYSNAAYMAYGYASKTKLGSVGGQTDISIDYNIPCVSSSGTFPCPQEDSYGNWGCKGMGACSNSQGIAYWSTDLFGFYTTPTNVTLEMTGYFLPPQTGSYTFKFATVDDSAILSVGGATAFNCCAQQQPPITSTNFTIDGIKPWGGSLPPNIEGTVYMYAGYYYPMKVVYSNAVSWGTLPISVTLPDGTTVSDDFEGYVYSFDDDLSQSNCTVPDPSNYAVSTTTTTTEPWTGTFTSTSTEMTTVTGTNGVPTDETVIVIRTPTTASTIITTTEPWNSTFTSTSTELTTVTGTNGVRTDETIIVIRTPTTATTAITTTEPWNSTFTSTSTELTTVTGTNGLPTDETIIVIRTPTTATTAMTTTQPWNDTFTSTSTELTTVTGTNGLPTDETIIVIRTPTTATTAMTTTQPWNDTFTSTSTELTTVTGTNGLPTDETIIVIRTPTTATTAMTTTQPWNDTFTSTSTEITTVTGTNGLPTDETIIVIRTPTTATTAMTTPQPWNDTFTSTSTEMTTVTGTNGLPTDETIIVIRTPTTATTAITTTEPWNSTFTSTSTEMTTVTGTNGLPTDETIIVIRTPTTATTAITTTQPWNDTFTSTSTEMTTVTGTNGLPTDETIIVIRTPTTATTAMTTTQPWNDTFTSTSTEITTVTGTTGLPTDETIIVIRTPTTATTAMTTTQPWNDTFTSTSTEMTTVTGTNGVPTDETVIVIRTPTSEGLISTTTEPWTGTFTSTSTEMTTVTGTNGQPTDETVIVIRTPTSEGLVTTTTEPWTGTFTSTSTEMTTITGTNGVPTDETVIVIRTPTSEGLISTTTEPWTGTFTSTSTEMTTITGTNGQPTDETVIVIRTPTSEGLISTTTEPWTGTFTSTSTEMTHVTGTNGVPTDETVIVIRTPTSEGLISTTTEPWTGTFTSTSTEVTTITGTNGQPTDETVIVIRTPTSEGLISTTTEPWTGTFTSTSTEMTTVTGTNGQPTDETVIVIRTPTSEGLVTTTTEPWTGTFTSTSTEMSTVTGTNGLPTDETVIVVKTPTTAISSSLSSSSSGQITSSITSSRPIITPFYPSNGTSVISSSVISSSVTSSLFTSSPVISSSVISSSTTTSTSIFSESSKSSVIPTSSSTSGSSESETSSAGSVSSSSFISSESSKSPTYSSSSLPLVTSATTSQETASSLPPATTTKTSEQTTLVTVTSCESHVCTESISPAIVSTATVTVSGVTTEYTTWCPISTTETTKQTKGTTEQTTETTKQTTVVTISSCESDVCSKTASPAIVSTSTATINGVTTEYTTWCPISTTESRQQTTLVTVTSCESGVCSETASPAIVSTATATVNDVVTVYPTWRPQTANEESVSSKMNSATGETTTNTLAAETTTNTVAAETITNTGAAETKTVVTSSLSRSNHAETQTASATDVIGHSSSVVSVSETGNTKSLTSSGLSTMSQQPRSTPASSMVGYSTASLEISTYAGSANSLLAGSGLSVFIASLLLAII

SEQ ID NO: 21073 - protein, 1075 aa, Saccharomyces cerevisiae
MTIAHHCIFLVILAFLALINVASGATEACLPAGQRKSGMNINFYQYSLKDSSTYSNAAYMAYGYASKTKLGSVGGQTDISIDYNIPCVSSSGTFPCPQEDSYGNWGCKGMGACSNSQGIAYWSTDLFGFYTTPTNVTLEMTGYFLPPQTGSYTFSFATVDDSAILSVGGSIAFECCAQEQPPITSTNFTINGIKPWDGSLPDNITGTVYMYAGYYYPLKVVYSNAVSWGTLPISVELPDGTTVSDNFEGYVYSFDDDLSQSNCTIPDPSIHTTSTITTTTEPWTGTFTSTSTEMTTITDTNGQLTDETVIVIRTPTTASTITTTTEPWTGTFTSTSTEMTTVTGTNGQPTDETVIVIRTPTSEGLITTTTEPWTGTFTSTSTEMTTVTGTNGQPTDETVIVIRTPTSEGLITTTTEPWTGTFTSTSTEVTTITGTNGQPTDETVIVIRTPTSEGLITTTTEPWTGTFTSTSTEMTTVTGTNGQPTDETVIVIRTPTSEGLISTTTEPWTGTFTSTSTEVTTITGTNGQPTDETVIVIRTPTSEGLITTTTEPWTGTFTSTSTEMTTVTGTNGQPTDETVIVIRTPTSEGLITRTTEPWTGTFTSTSTEVTTITGTNGQPTDETVIVIRTPTTAISSSLSSSSGQITSSITSSRPIITPFYPSNGTSVISSSVISSSVTSSLVTSSSFISSSVISSSTTTSTSIFSESSTSSVIPTSSSTSGSSESKTSSASSSSSSSSISSESPKSPTNSSSSLPPVTSATTGQETASSLPPATTTKTSEQTTLVTVTSCESHVCTESISSAIVSTATVTVSGVTTEYTTWCPISTTETTKQTKGTTEQTKGTTEQTTETTKQTTVVTISSCESDICSKTASPAIVSTSTATINGVTTEYTTWCPISTTESKQQTTLVTVTSCESGVCSETTSPAIVSTATATVNDVVTVYPTWRPQTTNEQSVSSKMNSATSETTTNTGAAETKTAVTSSLSRFNHAETQTASATDVIGHSSSVVSVSETGNTMSLTSSGLSTMSQQPRSTPASSMVGSSTASLEISTYAGSANSLLAGSGLSVFIASLLLAII

SEQ ID NO: 21074 - protein, 1322 aa, Saccharomyces cerevisiae
MSLAHYCLLLAIVTLLGLTNVVSATTAACLPANSRKNGMNVNFYQYSLRDSSTYSNAAYMAYGYASKTKLGSVGGQTDISIDYNIPCVSSSGTFPCPQEDLYGNWGCKGIGACSNNPIIAYWSTDLFGFYTTPTNVTLEMTGYFLPPQTGSYTFKFATVDDSAILSVGGSIAFECCAQEQPPITSTNFTINGIKPWNGSPPDNITGTVYMYAGFYYPMKIVYSNAVAWGTLPISVTLPDGTTVSDDFEGYVYTFDNNLSQPNCTIPDPSNYTVSTTITTTEPWTGTFTSTSTEMTTVTGTNGVPTDETVIVIRTPTTASTIITTTEPWNSTFTSTSTELTTVTGTNGVRTDETIIVIRTPTTATTAITTTEPWNSTFTSTSTELTTVTGTNGLPTDETIIVIRTPTTATTAMTTTQPWNDTFTSTSTELTTVTGTNGLPTDETIIVIRTPTTATTAMTTTQPWNDTFTSTSTELTTVTGTNGLPTDETIIVIRTPTTATTAMTTTQPWNDTFTSTSTEITTVTGTNGLPTDETIIVIRTPTTATTAMTTTQPWNDTFTSTSTEMTTVTGTNGLPTDETIIVIRTPTTATTAITTTEPWNSTFTSTSTEMTTVTGTNGLPTDETIIVIRTPTTATTAITTTQPWNDTFTSTSTEMTTVTGTNGLPTDETIIVIRTPTTATTAMTTTQPWNDTFTSTSTEITTVTGTNGLPTDETIIVIRTPTTATTAMTTTQPWNDTFTSTSTEMTTVTGTNGVPTDETVIVIRTPTSEGLISTTTEPWTGTFTSTSTEMTTVTGTNGQPTDETVIVIRTPTSEGLVTTTTEPWTGTFTSTSTEMTTITGTNGQPTDETVIIVKTPTTAISSSLSSSSGQITSFITSARPIITPFYPSNGTSVISSSVISSSDTSSLVISSSVTSSLVTSSPVISSSFISSPVISSTTTSASILSESSKSSVIPTSSSTSGSSESETGSASSASSSSSISSESPKSTYSSSSLPPVTSATTSQEITSSLPPVTTTKTSEQTTLVTVTSCESHVCTESISSAIVSTATVTVSGATTEYTTWCPISTTEITKQTTETTKQTKGTTEQTTETTKQTTVVTISSCESDVCSKTASPAIVSTSTATINGVTTEYTTWCPISTTESKQQTTLVTVTSCGSGVCSETTSPAIVSTATATVNDVVTVYSTWRPQTTNEQSVSSKMNSATSETTTNTGAAETTTSTGAAETKTVVTSSISRFNHAETQTASATDVIGHSSSVVSVSETGNTKSLTSSGLSTMSQQPRSTPASSMVGSSTASLEISTYAGSANSLLAGSGLSVFIASLLLAII

SEQ ID NO: 21075 - protein, 231 aa, Saccharomyces cerevisiae
MNGLVLGATGLCGGGFLRHAQEAPQFSKVYAILRRELPFPATDKVVAIVERDNSKWSQLITNEMNPQVLFTALATTRAAAGGLDKQYKIDHDLNLQLAQAAKEKGCETIVLVSSAGAHPDSRFGYMKMKGEIERDVIALDFKHIIILRPGPLLGERTNSKQSGFGGNLTAALGTRVYRSRFQRLLGYPVYGDEVGKVGVHLALNTSGKDKVQFVSSKDILDISASLEKIAT

SEQ ID NO: 21076 - protein, 353 aa, Saccharomyces cerevisiae
MPKRIVYNISSDFQLKSLLGEGAYGVVCSATHKPTGEIVAIKKIEPFDKPLFALRTLREIKILKHFKHENIITIFNIQRPDSFENFNEVYIIQELMQTDLHRVISTQMLSDDHIQYFIYQTLRAVKVLHGSNVIHRDLKPSNLLINSNCDLKVCDFGLARIIDESAADNSEPTGQQSGMTEYVATRWYRAPEVMLTSAKYSRAMDVWSCGCILAELFLRRPIFPGRDYRHQLLLIFGIIGTPHSDNDLRCIESPRAREYIKSLPMYPAAPLEKMFPRVNPKGIDLLQRMLVFDPAKRITAKEALEHPYLQTYHDPNDEPEGEPIPPSFFEFDHYKEALTTKDLKKLIWNEIFS

SEQ ID NO: 21077 - protein, 152 aa, Saccharomyces cerevisiae
MQYHSALYVYIYVTFTTIPYKEKPDIISICFSMLSFVFDFSVRICSRTLESFSWSLISSSAFKVVSAFSLAGSCVLASRSSVGIIVSLLLFNFSTCNFVLFLSAVLIDLFFCTFLPTPTFLPTPFFFMLHLPIFSLLNALELLYLIIAGLHI

SEQ ID NO: 21078 - protein, 855 aa, Saccharomyces cerevisiae
MSEGKQQFKDSNKPHKDSTDQDDDAATIVPQTLTYSRNEGHFLGSNFHGVTDDRTTLFDGEEGRREDDLLPSLRSSNSKAHLISSQLSQWNYNNNRVLLKRSILKTQAFMDQLQEENNIRPIFIAANDEREKLHVLQLNIKLDGQYNTKEKNGFNIEKKALSKLFHSQIVSVTNHLNALKKRVDDVSSKVFITGDVNTGKSALCNSLLKQRLLPEDQLPCTNVFSEILEARENDGIEEVHAIPLNIAPTLKEAIDMYSIQNPKTYEIHTLKELPDLVPQNGKYALLKIYIKDDKRPASTSLLRNGTVDISLIDSPGLNMDSLQTAEVMSRQEEIDLVIFVVNAENQLTLSAKEFISLASREKKLMFFVVKKFDKIRDKQRCKELILKQIRDLSPETYKRAADFVHFVSKNGDELPHYHNENDNEDHGDRKPDDDPYSSSDPDPDFDSLEDSLRNFVLKKRSLSKLLPAKTYLSKLLSDIIMISKSNMKMYSEEEIKINEQLETLRPEILSARAKCNDLTTSVDQMAEQTITMTYNNTKEALLNALDVPLHEYPKYQGLGQIYDFIFSTEAFIANQIDESIGSSELFAKQKTDLLVKKIYEIGKNELGDDFMCERVFRSELMFRKRKHLIGKRLKVSLSITDLFAPTWKGFLSYLSWQKPVTAPLPDIEGQTNEGQIGLMKYLGLKNYPLTQYWSRPSLLFTSKIPTLTLYFLGSTKVVGNIILNGIKLSSWSSLKKLSVPVIVVGSLLGLTYLIHDLPRALPMNLSIKYKRKLQELDYIHLNAQRTSNEVRDVLRVPTREILRSCEIIMDKKQITKKELENKKESNLLSIKFFQSLYEGTVAQKLMVEEINLDID

SEQ ID NO: 21079 - protein, 559 aa, Saccharomyces cerevisiae
MLFKSLSKLATAAAFFAGVATADDVPAIEVVGNKFFYSNNGSQFYIRGVAYQADTANETSGSTVNDPLANYESCSRDIPYLKKLNTNVIRVYAINTTLDHSECMKALNDADIYVIADLAAPATSINRDDPTWTVDLFNSYKTVVDTFANYTNVLGFFAGNEVTNNYTNTDASAFVKAAIRDVRQYISDKNYRKIPVGYSSNDDEDTRVKMTDYFACGDDDVKADFYGINMYEWCGKSDFKTSGYADRTAEFKNLSIPVFFSEYGCNEVTPRLFTEVEALYGSNMTDVWSGGIVYMYFEETNKYGLVSIDGNDVKTLDDFNNYSSEINKISPTSANTKSYSATTSDVACPATGKYWSAATELPPTPNGGLCSCMNAANSCVVSDDVDSDDYETLFNWICNEVDCSGISANGTAGKYGAYSFCTPKEQLSFVMNLYYEKSGGSKSDCSFSGSATLQTATTQASCSSALKEIGSMGTNSASGSVDLGSGTESSTASSNASGSSSKSNSGSSGSSSSSSSSSASSSSSSKKNAATNVKANLAQVVFTSIISLSIAAGVGFALV

SEQ ID NO: 21080 - protein, 524 aa, Saccharomyces cerevisiae
MQLSKSILLAALAATPSLVNAMLPIHIKNYRFIKPSSATNSESDNEVFFVKGVDYQPGGSSGYDADSDTDILSDPEVCARDAYAFQQLGVNTVRIYSLNPDLNHDKCMTIFNNAGIYAILDVNSGNYGESLNRADPSGTYDSLYLSRVFKFIDAFKNYPNVLGFFSGNEVINDQSDYAKIDPPYIRAVQRDMKQYISKHANRSIPVGYSAADNTDLRLATFKYLQCNSLDGNKVNDDLDISKSDFFGLNTYEWCSGTSSWESSGYDKLNSTFEDAVIPLIFSEYGCNKNTPRTFDEVSEGLYGGLKNVFSGGLVYEYTEEANNYGLVKLDDSGSLTYKDDFVNLESQLKNVSLPTTKESEISSDSIYKCDNSAITNIYSGFGTNNFTLPSQPAEIANMIEYGVNGTNTGKILTDYAVPTTFNYTIKNNKDDTISATISYDKANSLNELDVTATTVAKSASTSQSSSRSLTSSTSPSSSTGSSSSTGSSSASSSSKSKGVGNIVNVSFSQSGYLALFAGLISALL

SEQ ID NO: 21081 - protein, 484 aa, Saccharomyces cerevisiae
MLLRSLTSAFVLSAGLAQAASSSNSSTPSIEIKGNAFFNSESGERFYIRGVDYQPGGSSNLTDPLADASVCDRDVPVLKDLGINTVRVYTVDNSQDHSHCMKLLQENGIYLILDVNTPTSAISRYDPACSYNADYLQNVFATIDTFADYDNVLGFFAGNEVINSVNTTNTATYVKAVVRDMKKYIKARKYRQIPVGYSAADIVANRQLAAEYFNCGDEADARIDMFGVNDYSWCGESSFVVSGYSTKMKLYQDYSVPVFLSEFGCNQVKSSRPFTEIEAIYSTQMSSVFSGGLVYEYSNETNNYGLVQIDGDKVTKLTDFENLKNEYSKVSNPEGNGGYSTSNNYSTCPDYEKGVWEANNTLPAMPSAASAYFTSGAGSPMGTGIATQQSCDAKDDDDEEDDDTSSSSSSSSSSSSSASSSSESSSSTSKASSSSPSASETSLLKSAASATSSSQSSSKSKGAAGIIEIPLIFRALAELYNLVL

SEQ ID NO: 21082 - protein, 662 aa, Saccharomyces cerevisiae
MTKETIRVVICGDEGVGKSSLIVSLTKAEFIPTIQDVLPPISIPRDFSSSPTYSPKNTVLIDTSDSDLIALDHELKSADVIWLVYCDHESYDHVSLFWLPHFRSLGLNIPVILCKNKCDSISNVNANAMVVSENSDDDIDTKVEDEEFIPILMEFKEIDTCIKTSAKTQFDLNQAFYLCQRAITHPISPLFDAMVGELKPLAVMALKRIFLLSDLNQDSYLDDNEILGLQKKCFNKSIDVNELNFIKDLLLDISKHDQEYINRKLYVPGKGITKDGFLVLNKIYAERGRHETTWAILRTFHYTDSLCINDKILHPRLVVPDTSSVELSPKGYRFLVDIFLKFDIDNDGGLNNQELHRLFKCTPGLPKLWTSTNFPFSTVVNNKGCITLQGWLAQWSMTTFLNYSTTTAYLVYFGFQEDARLALQVTKPRKMRRRSGKLYRSNINDRKVFNCFVIGKPCCGKSSLLEAFLGRSFSEEYSPTIKPRIAVNSLELKGGKQYYLILQELGEQEYAILENKDKLKECDVICLTYDSSDPESFSYLVSLLDKFTHLQDLPLVFVASKADLDKQQQRCQIQPDELADELFVNHPLHISSRWLSSLNELFIKITEAALDPGKNTPGLPEETAAKDVDYRQTALIFGSTVGFVALCSFTLMKLFKSSKFSK

SEQ ID NO: 21083 - protein, 532 aa, Saccharomyces cerevisiae
MSNDGSKILNYTPVSKIDEIVEISRNFFFEKQLKLSHENNPRKKDLEFRQLQLKKLYYAVKDHEEELIDAMYKDFHRNKIESVLNETTKLMNDILHLIEILPKLIKPRRVSDSSPPFMFGKTIVEKISRGSVLIIAPFNFPLLLAFAPLAAALAAGNTIVLKPSELTPHTAVVMENLLTTAGFPDGLIQVVQGAIDETTRLLDCGKFDLIFYTGSPRVGSIVAEKAAKSLTPCVLELGGKSPTFITENFKASNIKIALKRIFFGAFGNSGQICVSPDYLLVHKSIYPKVIKECESVLNEFYPSFDEQTDFTRMIHEPAYKKAVASINSTNGSKIVPSKISINSDTEDLCLVPPTIVYNIGWDDPLMKQENFAPVLPIIEYEDLDETINKIIEEHDTPLVQYIFSDSQTEINRILTRLRSGDCVVGDTVIHVGITDAPFGGIGTSGYGNYGGYYGFNTFSHERTIFKQPYWNDFTLFMRYPPNSAQKEKLVRFAMERKPWFDRNGNNKWGLRQYFSLSAAVILISTIYAHCSS

SEQ ID NO: 21084 - protein, 116 aa, Saccharomyces cerevisiae
MIETAIYGKTVDDQSRCVHWHLPKDVIAIRFKCCDKYYACFECHQELSSHPLEKYDLLDDANKHLIICGVCRHEMTFAEYYDYNSNLICPNCRSPFNPGCKLHYHLYFQNPPPAMC

SEQ ID NO: 21085 - protein, 967 aa, Saccharomyces cerevisiae
MFNRFNKLQAALALVLYSQSALGQYYTNSSSIASNSSTAVSSTSSGSVSISSSIELTSSTSDVSSSLTELTSSSTEVSSSIAPSTSSSEVSSSITSSGSSVSGSSSITSSGSSVSSSSSATESGSSASGSSSATESGSSVSGSSTSITSGSSSATESGSSVSGSTSATESGSSASGSSSATESGSSASGSSSATESGSSVSGSSSATESGSSVSGSSSATESGSASSVPSSSGSVTESGSSSSASESSITQSGTASGSSASSTSGSVTQSGSSVSGSSASSAPGISSSIPQSTSSASTASGSITSGTLSSITSSASSATATASNSLSSSDGTIYLPSTTISGDITLTGSVIATEAVEVAAGGKLTLLDGDKYVFSADFIIHGGVFVEKSKPTYPGTEFDISGENFDVSGTFNAEEPAASSASAYSFTPGSFDNSGDISLSLSESTKGEVTFSPYSNSGAFSFSNAILNGGSVSGLQRRAESGSVNNGEINLENGSTYVVVEPVSGSGTINIISGNLYLHYPDTFTGQTVVFKGEGVLAVDPTETNTTPIPVVGYTGENQIAITADVTALSYDSATGVLTATQGNSQFSFSIGTGFSSSGFNVSEGTFAGAYAYYLNYGGVVASSATPSSTSTTSGATNSTSGSTSFGASVTGSTASTSFGASVTGSTASTLISGSPSVYTTTLTYATTTSTVVVSCSETTDSNGNVYTITTTVPCSSTTATITSCDETGCHVTTSTGTVATETVSSKSYTTVTVTHCDNNGCNTKTVTSECPEETSATTTSPKSYTTVTVTHCDDNGCNTKTVTSEAPEATTTTVSPKTYTTATVTQCDDNGCSTKTVTSEAPKETSETSETSAAPKTYTTATVTQCDDNGCNVKIITSQIPEATSTVTATSASPKSYTTVTSEGSKATSLTTAISKASSAISTYSKSAAPIKTSTGIIVQSEGIAAGLNANTLNALVGIFVLAFFN

SEQ ID NO: 21086 - protein, 368 aa, Saccharomyces cerevisiae
MQYKKTLVASALAATTLAAYAPSEPWSTLTPTATYSGGVTDYASTFGIAVQPISTTSSASSAATTASSKAKRAASQIGDGQVQAATTTASVSTKSSAAAVSQIGDGQIQATTKTTAAAVSRDGQIQATTKTTSAKTTAAAVSQIGDGQIQATTTTLAPKSTAAAVSQMGDGQIQATTKTTAAAVSQIGDGQVQATTKTTAAAVSQIGDGQVQATTKTTAAAVSQITDGQVQATTKTTQAASQVSDGQVQATSATSASAAATSTDPVDAVSCKTSGTLEMNLKGGILTDGKGRIGSIVANRQFQFDGPPPQAGAIYAAGWSITPDGNLAIGDNDVFYQCLSGTFYNLYDEHIGSQCTPVHLEAIDLIDC

SEQ ID NO: 21087 - protein, 303 aa, Saccharomyces cerevisiae
MQYKKTLVASALAATTLAAYAPSEPWSTLTPTATYSGGVTDYASTFGIAVQPISTTSSASSAATTASSKAKRAASQIGDGQVQAATTTASVSTKSSAAAVSQIGDGQIQATTKTTAAASLKLVMVKIQATTKTTAAAVSQIGDGQVQATTKTTAAAVSQITDGQVQATTKTTQAASQVSDGQVQATSATSASAAATSTDPVDAVSCKTSGTLEMNLKGGILTDGKGRIGSIVANRQFQFDGPPPQAGAIYAAGWSITPDGNLAIGDNDVFYQCLSGTFYNLYDEHIGSQCTPVHLEAIDLIDC

SEQ ID NO: 21088 - protein, 389 aa, Saccharomyces cerevisiae
MQYKKTLVASALAATTLAAYAPSEPWSTLTPTATYSGGVTDYASTFGIAVQPISTTSSASSAATTASSKAKRAASQIGDGQVQAATTTASVSTKSTAAAVSQIGDGQVQATTKTTAAAVSQIGDGQIQATTKTTSAKTTAAAVSQIGDGQIQATTTTLAPKSTAAAVSQIGDGQVQATTKTTAAAVSQIGDGQVQATTKTTAAAVSQIGDGQVQATTKTTAAAVSQIGDGQVQATTKTTAAAVSQITDGQVQATTKTTQAASQVSDGQVQATTATSASAAATSTDPVDAVSCKTSGTLEMNLKGGILTDGKGRIGSIVANRQFQFDGPPPQAGAIYAAGWSITPDGNLAIGDNDVFYQCLSGTFYNLYDEHIGSQCTPVHLEAIDLIDC

SEQ ID NO: 21089 - protein, 413 aa, Saccharomyces cerevisiae
MQYKKTLVASALAATTLAAYAPSEPWSTLTPTATYSGGVTDYASTFGIAVQPISTTSSASSAATTASSKAKRAASQIGDGQVQAATTTASVSTKSTAAAVSQIGDGQIQATTKTTAAAVSQIGDGQIQATTKTTSAKTTAAAVSQISDGQIQATTTTLAPKSTAAAVSQIGDGQVQATTTTLAPKSTAAAVSQIGDGQVQATTKTTAAAVSQIGDGQVQATTKTTAAAVSQIGDGQVQATTKTTAAAVSQIGDGQVQATTKTTAAAVSQITDGQVQATTKTTQAASQVSDGQVQATTATSASAAATSTDPVDAVSCKTSGTLEMNLKGGILTDGKGRIGSIVANRQFQFDGPPPQAGAIYAAGWSITPDGNLAIGDNDVFYQCLSGTFYNLYDEHIGSQCTPVHLEAIDLIDC

SEQ ID NO: 21090 - protein, 642 aa, Saccharomyces cerevisiae [sequence omitted]

SEQ ID NO: 21091 - protein, 639 aa, Saccharomyces cerevisiae
MSKAVGIDLGTTYSCVAHFSNDRVDIIANDQGNRTTPSFVGFTDTERLIGDAAKNQAAMNPANTVFDAKRLIGRNFNDPEVQGDMKHFPFKLIDVDGKPQIQVEFKGETKNFTPEQISSMVLGKMKETAESYLGAKVNDAVVTVPAYFNDSQRQATKDAGTIAGLNVLRIINEPTAAAIAYGLDKKGKEEHVLIFDLGGGTFDVSLLSIEDGIFEVKATAGDTHLGGEDFDNRLVNHFIQEFKRKNKKDLSTNQRALRRLRTACERAKRTLSSSAQTSVEIDSLFEGIDFYTSITRARFEELCADLFRSTLDPVEKVLRDAKLDKSQVDEIVLVGGSTRIPKVQKLVTDYFNGKEPNRSINPDEAVAYGAAVQAAILTGDESSKTQDLLLLDVAPLSLGIETAGGVMTKLIPRNSTIPTKKSEVFSTYADNQPGVLIQVFEGERAKTKDNNLLGKFELSGIPPAPRGVPQIEVTFDVDSNGILNVSAVEKGTGKSNKITITNDKGRLSKEDIEKMVAEAEKFKEEDEKESQRIASKNQLESIAYSLKNTISEAGDKLEQADKDAVTKKAEETIAWLDSNTTATKEEFDDQLKELQEVANPIMSKLYQAGGAPEGAAPGGFPGGAPPAPEAEGPTVEEVD

SEQ ID NO: 21092 - protein, 731 aa, Saccharomyces cerevisiae
MFRVFGSFGSKGNQSSGEEQSTKTKQVLKQANDFEIALKAMDFVLDDRTDEGLNLLKKAEMETGSDQTILTLARGVIEFLQATLSFETEEMKRAAITLGKAEQMSWKSKQNAEKTNFRSSSIYPPGTVYAVTYTESCLLHALLMLFSESMMEAAKALLKLRRAYTMLQDIMVTVKKAERSKNSSSPSPSEKSQESCGSFVSAETTFISVDIPYKLSSEDKSNPLLLEFAEKIYTMRMGRLSGAHIGNTPSFHRLRDDLGLQTTPSQASDRHSVSDDFDLEQATIDEFIHSGANLCYGILQVVLSLLPPAIGAVLSIVGFKGSREEGLRLVWKAIKERNVHGCIGLLGLMFYYDGPFQFTDADFDIPPNDNGSRALNKSRTNDSSLLPGYMDSATLLHPGKILEDALLKARALFPNSALWLLNEAKMLAGKGRLRDSLALMDSIDVNSIRMRQVKSLMVFERAILLVNLHEYNRAADDLISLLDISDWSHALYTYFAGCCYLENWRMTQLGLLNDGKEQFYKERARELIFDAPSLLGKKTFKSKNLPLDRFMLRKVQQFNNMQKKLNLQEPLDSIATSPVHELAYFYNGYNRMTENDLILTKKMLTEYHNPAIDSEDPDQELIRNLLLSLTLRRLGDAERGLALLDDIVLPKIFYIQNGKVKYFKKTEDPWAYPAALYERALFCWKLGGMESLNECREWLLRAQNYAADYELSTRIGMKIKAALDRVENALA

SEQ ID NO: 21093 - protein, 731 aa, Saccharomyces cerevisiae
MFRVFGSFGSKGNQSSGEEQSTKTKQVLKQANDFEIALKAMDFVLDDRTDEGLNLLKKAEMETGSDQTILTLARGVIEFLQATLSFETEEMKRAAITLGKAEQMSWKSKQNAEKTNFRSSSIYPPGTVYAVTYTESCLLHALLMLFSESMMEAAKALLKLRRAYTMLQDIMVTVKKAERSKNSSSPSPSEKSQESCGSFVSAETTFISVDIPYKLSSEDKSNPLLLEFAEKIYTMRMGRLSGAHIGNTPSFHRLRDDLGLQTTPSQASDRHSVSDDFDLEQATIDEFIHSGANLCYGILQVVLSLLPPAIGAVLSIVGFKGSREEGLRLVWKATKERNVHGCIGLLGLMFYYDGPFQFTDADFDIPPNDNGSRALNKSRTNDSSLLPGYMDSATLLHPGKILEDALLKARALFPNSALWLLNEAKMLAGKGRLRDSLALMDSIDVNSIRMRQVKSLMVFERAILLVNLHEYNRAADDLISLLDISDWSHALYTYFAGCCYLENWRMTQLGLLNDGKEQFYKERARELIFDAPSLLGKKTFKSKNLPLDRFMLRKVQQFNNMQKKLNLQEPLDSIATSPVHELAYFYNGYNRMTENDLILTKKMLTEYHNPAIDSEDPDQELIRNLLLSLTLRRLGDAERGLALLDDIVLPKIFYIQNGKVKYFKKTEDPWAYPAALYERALFCWKLGGMESLNECREWLLRAQNYAADYELSTRIGMKIKAALDRVENALA

SEQ ID NO: 21094 - protein, 532 aa, Saccharomyces cerevisiae
MLLQAFLFLLAGFAAKISASMTNETSDRPLVHFTPNKGWMNDPNGLWYDAKEGKWHLYFQYNPNDTVWGLPLFWGHATSDDLTHWQDEPVAIAPKRKDSGAYSGSMVIDYNNTSGFFNDTIDPRQRCVAIWTYNTPESEEQYISYSLDGGYTFTEYQKNPVLAANSTQFRDPKVFWYEPSKKWIMTAAKSQDYKIEIYSSDDLKSWKLESAFANEGFLGYQYECPGLIEVPSEQDPSKSHWVMFISINPGAPAGGSFNQYFVGSFNGHHFEAFDNQSRVVDFGKDYYALQTFFNTDPTYGSALGIAWASNWEYSAFVPSNPWRSSMSLVRPFSLNTEYQANPETELINLKAEPILNISSAGPWSRFATNTTLTKANSYNVDLSNSTGTLEFELVYAVNTTQTISKSVFADLSLWFKGLEDPEEYLRMGFEVSASSFFLDRGNSKVKFVKENPYFTNRMSVNNQPFKSENDLSYYKVYGLLDQNILELYFNDGDVVSTNTYFMTTGNALGSVNMTTGVDNLFYIDKFQVREVK

SEQ ID NO: 21095 - protein, 512 aa, Saccharomyces cerevisiae
MTNETSDRPLVHFTPNKGWMNDPNGLWYDAKEGKWHLYFQYNPNDTVWGLPLFWGHATSDDLTHWQDEPVAIAPKRKDSGAYSGSMVIDYNNTSGFFNDTIDPRQRCVAIWTYNTPESEEQYISYSLDGGYTFTEYQKNPVLAANSTQFRDPKVFWYEPSKKWIMTAAKSQDYKIEIYSSDDLKSWKLESAFANEGFLGYQYECPGLIEVPSEQDPSKSHWVMFISINPGAPAGGSFNQYFVGSFNGHHFEAFDNQSRVVDFGKDYYALQTFFNTDPTYGSALGIAWASNWEYSAFVPSNPWRSSMSLVRPFSLNTEYQANPETELINLKAEPILNISSAGPWSRFATNTTLTKANSYNVDLSNSTGTLEFELVYAVNTTQTISKSVFADLSLWFKGLEDPEEYLRMGFEVSASSFFLDRGNSKVKFVKENPYFTNRMSVNNQPFKSENDLSYYKVYGLLDQNILELYFNDGDVVSTNTYFMTTGNALGSVNMTTGVDNLFYIDKFQVREVK

SEQ ID NO: 21096 - protein, 532 aa, Saccharomyces cerevisiae
MLLQAFLFLLAGFAAKISASMTNETSDRPLVHFTPNKGWMNDPNGLWYDEKDAKWHLYFQYNPNDTVWGTPLFWGHATSDDLTNWEDQPIAIAPKRNDSGAFSGSMVVDYNNTSGFFNDTIDPRQRCVAIWTYNTPESEEQYISYSLDGGYTFTEYQKNPVLAANSTQFRDPKVFWYEPSQKWIMTAAKSQDYKIEIYSSDDLKSWKLESAFANEGFLGYQYECPGLIEVPTEQDPSKSYWVMFISINPGAPAGGSFNQYFVGSFNGTHFEAFDNQSRVVDFGKDYYALQTFFNTDPTYGSALGIAWASNWEYSAFVPTNPWRSSMSLVRKFSLNTEYQANPETELINLKAEPILNISNAGPWSRFATNTTLTKANSYNVDLSNSTGTLEFELVYAVNTTQTISKSVFADLSLWFKGLEDPEEYLRMGFEVSASSFFLDRGNSKVKFVKENPYFTNRMSVNNQPFKSENDLSYYKVYGLLDQNILELYFNDGDVVSTNTYFMTTGNALGSVNMTTGVDNLFYIDKFQVREVK

SEQ ID NO: 21097 - protein, 512 aa, Saccharomyces cerevisiae
MTNETSDRPLVHFTPNKGWMNDPNGLWYDEKDAKWHLYFQYNPNDTVWGTPLFWGHATSDDLTNWEDQPIAIAPKRNDSGAFSGSMVVDYNNTSGFFNDTIDPRQRCVAIWTYNTPESEEQYISYSLDGGYTFTEYQKNPVLAANSTQFRDPKVFWYEPSQKWIMTAAKSQDYKIEIYSSDDLKSWKLESAFANEGFLGYQYECPGLIEVPTEQDPSKSYWVMFISINPGAPAGGSFNQYFVGSFNGTHFEAFDNQSRVVDFGKDYYALQTFFNTDPTYGSALGIAWASNWEYSAFVPTNPWRSSMSLVRKFSLNTEYQANPETELINLKAEPILNISNAGPWSRFATNTTLTKANSYNVDLSNSTGTLEFELVYAVNTTQTISKSVFADLSLWFKGLEDPEEYLRMGFEVSASSFFLDRGNSKVKFVKENPYFTNRMSVNNQPFKSENDLSYYKVYGLLDQNILELYFNDGDVVSTNTYFMTTGNALGSVNMTTGVDNLFYIDKFQVREVK

SEQ ID NO: 21098 - protein, 222 aa, Saccharomyces cerevisiae
MSSSESIRMVLIGPPGAGKGTQAPNLQERFHAAHLATGDMLRSQIAKGTQLGLEAKKIMDQGGLVSDDIMVNMIKDELTNNPACKNGFILDGFPRTIPQAEKLDQMLKEQGTPLEKAIELKVDDELLVARITGRLIHPASGRSYHKIFNPPKEDMKDDVTGEALVQRSDDNADALKKRLAAYHAQTEPIVDFYKKTGIWAGVDASQPPATVWADILNKLGKD

SEQ ID NO: 21099 - protein, 222 aa, Saccharomyces cerevisiae
MSSSESIRMVLIGPPGAGKGTQAPNLQERFHAAHLATGDMLRSQIAKGTQLGLEAKKIMDQGGLVSDDIMVNMIKDELTNNPACKNGFILDGFPRTIPQAEKLDQMLKEQGTPLEKAIELKVDDELLVARITGRLIHPASGRSYHKIFNPPKEDMKDDVTGEALVQRSDDNADALKKRLAAYHAQTEPIVDFYKKTGIWAGVDASQPPATVWADILNKLGKN

SEQ ID NO: 21100 - protein, 222 aa, Saccharomyces cerevisiae; identical to SEQ ID NO: 21098

SEQ ID NO: 21101 - protein, 708 aa, Saccharomyces cerevisiae
MPRFAIIFALLIAYSLFLSTLFTGSIPDRANTVTSNAPCQVVIWDWIRTRRICNCCSRLCYSLLGRSNLSRTAKRGVCTIAGAVLATAAVIVAAVLVGKSSGSATKRGLTKTISVLNHTIPFTDHILNGQTLSNGTGSNFVTIGFSGYAVHATIKRASTTDIISWVIPESMEPTLARVASYVSSSSINLAAVPDTGGNASALSFQNAVQEFATSWVSMTYDQSYGDLRNVANDEGGEEILILMRKRSYRISFQVIETGSTALLLRTRRVVSQLITMTYLVTVQARVGIQIGDIFQHYGGIDNYVMTSISVLRTLEDKAFHENKLLIVREPPNKSNQDANQSYRLRPFSANDLIQNLKSVDIGFLAFCSFFDKYAHYPEIIMMKITIFISKGNLWSIIYVIQARYVRKRVMKVRGQMPGGLLTNMESLLNIVSTPNLNISEFHIQTHSMSQSKPMYFQKQCYSSQNNIIYIYNSIHITCGAVYVIVHDVRTPSVFVLIELRNCKPLKNSWCETTKTSPRDTKIKKNEYNETVCRRAGALLDGRVRTIRFLMMRTHWSRVKGVSCNTANRLSRFCNHVVSYYPSQNATIHLLPTSLRAESLEQQYTTRPLSSSNNRFCCLKSIFINNCKKACESPSLVSCNLQQTAELLMVYYLYICEACYVSRNHDLLSKQCMSTVRAVYVARMRLPKFRSTFPCMPRLCWLVNGVVVV

SEQ ID NO: 21102 - protein, 268 aa, Saccharomyces cerevisiae
MLIVLFLTLFCSVVFRTAYCDVAIVAPEPNSVYDLSGTSQAVVKVKWMHTDNTPQEKDFVRYTFTLCSGTNAMIEAMATLQTLSASDLTDNEFNAIIENTVGTDGVYFIQVFAQTAIGYTIHYTNRFKLKGMIGTKAANPSMITIAPEAQTRITTGDVGATIDSKSFTVPYNLQTGVVKYAPMQLQPATKVTAKTWKRKYATSEVTYYYTLRNSVDQHTTVTPGWSYIITADSNYATPAPMPADNGGWYNPRKRLSLTARKVNALRHR

SEQ ID NO: 21103 - protein, 313 aa, Saccharomyces cerevisiae
MMRRTLLHSFATLLLSLSLWSAAVMAAVTTQVTVVTNVAGALVTETTIWDPATAAAAATTTAQTGFFTTVFTTTNDVGTTVTLTQTVNRATMLPTTTTSTSSTGKTTTTVPTATSSLSSGLYLSTVTTTNDLGTTVTLTQTFTHSSTSATSSASSSVSSSVSSSGSSSSVKTTTSTGSAVAETGTRPDPSTDFTEPPVSAVTSLSIDSYITITEGTTSTYTTTRAPTSMWVTVVRQGNTITVQTTFVQRFSSQYVTVASPSVGSIGMGTLTGTVGVIKSAIKKTVSHNEAQHLGMSSFTSILGGLLTVLIWFL

SEQ ID NO: 21104 - protein, 276 aa, Saccharomyces cerevisiae
MRLQRNSIICALVFLVSFVLGDVNIVSPSSKATFSPSGGTVSVPVEWMDNGAYPSLSKISTFTFSLCTGPNNNIDCVAVLASKITPSELTQDDKVYSYTAEFASTLTGNGQYYIQVFAQVDGQGYTIHYTPRFQLTSMGGVTAYTYSATTEPTPQTSIQTTTTNNAQATTIDSRSFTVPYTKQTGTSRFAPMQMQPNTKVTATTWTRKFATSAVTYYSTFGSLPEQATTITPGWSYTISSGVNYATPASMPSDNGGWYKPSKRLSLSARKINMRKV

SEQ ID NO: 21105 - protein, 368 aa, Saccharomyces cerevisiae
MARTITFDIPSQYKLVDLIGEGAYGTVCSAIHKPSGIKVAIKKIQPFSKKLFVTRTIREIKLLRYFHEHENIISILDKVRPVSIDKLNAVYLVEELMETDLQKVINNQNSGFSTLSDDHVQYFTYQILRALKSIHSAQVIHRDIKPSNLLLNSNCDLKVCDFGLARCLASSSDSRETLVGFMTEYVATRWYRAPEIMLTFQEYTTAMDIWSCGCILAEMVSGKPLFPGRDYHHQLWLILEVLGTPSFEDFNQIKSKRAKEYIANLPMRPPLPWETVWSKTDLNPDMIDLLDKMLQFNPDKRISAAEALRHPYLAMYHDPSDEPEYPPLNLDDEFWKLDNKIMRPEEEEEVPIEMLKDMLYDELMKTME

SEQ ID NO: 21106 - protein, 316 aa, Saccharomyces cerevisiae
MTKPTQVLVRSVSILFFITLLHLVVALNDVAGPAETAPVSLLPREAPWYDKIWEVKDWLLQRATDGNWGKSITWGSFVASDAGVVIFGINVCKNCVGERKDDISTDCGKQTLALLVSIFVAVTSGHHLIWGGNRPVSQSDPNGATVARRDISTVADGDIPLDFSALNDILNEHGISILPANASQYVKRSDTAEHTTSFVVTNNYTSLHTDLIHHGNGTYTTFTTPHIPAVAKRYVYPMCEHGIKASYCMALNDAMVSANGNLYGLAEKLFSEDEGQWETNYYKLYWSTGQWIMSMKFIEESIDNANNDFEGCDTGH

SEQ ID NO: 21107 - protein, 302 aa, Saccharomyces cerevisiae
MFSRLSRSHSKALPIALGTVAIAAATAFYFANRNQHSFVFNESNKVFKGDDKWIDLPISKIEEESHDTRRFTFKLPTEDSEMGLVLASALFAKFVTPKGSNVVRPYTPVSDLSQKGHFQLVVKHYEGGKMTSHLFGLKPNDTVSFKGPIMKWKWQPNQFKSITLLGAGTGINPLYQLAHHIVENPNDKTKVNLLYGNKTPQDILLRKELDALKEKYPDKFNVTYFVDDKQDDQDFDGEIGFISKDFIQEHVPGPKESTHLFVCGPPPFMNAYSGEKKSPKDQGELIGILNNLGYSKDQVFKF

SEQ ID NO: 21108 - protein, 302 aa, Saccharomyces cerevisiae
MFSRLSRSHSKALPIALGTVAIAAATAFYFANRNQHSFVFNESNKVFKGDDKWIDLPISKIEEESHDTRRFTFKLPTEDSEMGLVLASALFAKFVTPKGSNVVRPYTPVSDLSQKGHFQLVVKHYEGGKMTSHLFGLKPNDTVSFKGPIMKWKWQPNQFKSITLLGAGTGINPLYQLAHHIVENPNDKTKVNLLYGNKTPQDILLRKELDALKEKYPDKFNVTYFVDDKQDDQDFDGEISFISKDFIQEHVPGPKESTHLFVCGPPPFMNAYSGEKKSPKDQGELIGILNNLGYSKDQVFKF

SEQ ID NO: 21109 - protein, 493 aa, Saccharomyces cerevisiae
MLPYMDQVLRAFYQSTHWSTQNSYEDITATSRTLLDFRIPSAIHLQISNKSTPNTFNSLDFSTRSRINGSLSYLYSDAQQLENFMRNSTDIPLQDATETYRQLQPNLNFSVSSGNTLSSDNTTVDNDKKLLHDSKFVKKSLYYGRMYYPSSDLEAMIIKRLNPQTQFMLKGVSSFKESLNVLTCYFQRDSHRNLQEWIFSTSDLLCGYRVLHNFLTTPSKFNTSLYNNSSLSLGAEFWLGLVSLSPGCSTTLRYYTHSTNTGRPLTLTLSWNPLFGHISSTYSAKTGTNSTFCAKYDFNLYSIESNLSFGCEFWQKKHHLLETNKNNNDKLEPISDELVDINSNSRATKLLHENVPDLNLAVNDIPSTLDIPVHKQKLLNDLTYAFSSSLRKIDEERSTIEKFDNKINSSIFTSVWKLSTSLRDKTLKLLWEGKWRGFLISAGTELVFTRGFQESLSDDEKNDNAISISATDTENGNIPVFPTKFGIQFQYST

SEQ ID NO: 21110 - protein, 493 aa, Saccharomyces cerevisiae; identical to SEQ ID NO: 21109

SEQ ID NO: 21111 - protein, 493 aa, Saccharomyces cerevisiae
MLPYMDQVLRAFYQSTHWSTQNSYEDITATSRTLLDFRIPSAIHLQISNKSTPNTFNSLDFSTRSRINGSLSYLYSDAQQLEKFMRNSTDIPLQDATETYRQLQPNLNYSVSSGNTLSSDNTTVDNDKKLLHDSKFVKKSLYYGRMYYPSSDLEAMIIKRLSPQTQFMLKGVSSFKESLNVLTCYFQRDSHRNLQEWIFSTSDLLCGYRVLHNFLTTPSKFNTSLYNNSSLSLGAEFWLGLVSLSPGCSTTLRYYTHSTNTGRPLTLTLSWNPLFGHISSTYSAKTGTNSTFCAKYDFNLYSIESNLSFGCEFWQKKHHLLETNKNNNDKLEPISDELVDINPNSRATKLLHENVPDLNSAVNDIPSTLDIPVHKQKLLNDLTYAFSSSLRKIDEERSTIEKFDNKINSSIFTSVWKLSTSLRDKTLKLLWEGKWRGFLISAGTELVFTRGFQESLSDDEKNDNAISISATDTENGNIPVFPAKFGIQFQYST

SEQ ID NO: 21112 - protein, 493 aa, Saccharomyces cerevisiae
MLPYMDQVLRAFYQSTHWSTQNSYEDITATSRTLLDFRIPSAIHLQISNKSTPNTFNSLDFSTRSRINGSLSYLYSDAQQLEKFMRNSTDIPLQDATETYRQLQPNLNFSVSSANTLSSDNTTVDNDKKLLHDSKFVKKSLYYGRMYYPSSDLEAMIIKRLSPQTQFMLKGVSSFKESLNVLTCYFQRDSHRNLQEWIFSTSDLLCGYRVLHNFLTTPSKFNTSLYNNSSLSLGAEFWLGLVSLSPGCSTTLRYYTHSTNTGRPLTLTLSWNPLFGHISSTYSAKTGTNSTFCAKYDFNLYSIESNLSFGCEFWQKKHHLLETNKNNNDKLEPISDELVDINPNSRATKLLHENVPDLNSAVNDIPSTLDIPVHKQKLLNDLTYAFSSSLRKIDEERSTIEKFDNKINSSIFTSVWKLSTSLRDKTLKLLWEGKWRGFLISAGTELVFTRGFQESLSDDEKNDNAISISATDTENGNIPVFPAKFGIQFQYST

SEQ ID NO: 21113 - protein, 271 aa, Saccharomyces cerevisiae
MSFDINWSTLESDNRLNDLIRKHLNSYLQNTQLPSYVSNLRVLDFDLGKVGPAITLKEITDPLDEFYDSIREEADQETEENNDNKEDSEHVCPDRTIANHEGPKDDFEAPVVMPSPNDIQFLLEVEYKGDLLVTIGADLVLNYPVEKFMTLPVKLSISDIGLHSLCIVACLSKQLFLSFLCDVSDPALDDNQTVLDPKGPILAATKPLERISIVRSMKIETEIGEQYQGQGSVLRSVGELEQFLFTIFKDFLRKELAWPSWINLDFNDGDE

SEQ ID NO: 21114 - protein, 271 aa, Saccharomyces cerevisiae
MSFDINWSTLESDNRLNDLIRKHLNSYLQNTQLPSYVSNLRVLDFDLGKVGPAITLKEITDPLDEFYDSIREEADQETEENNDNKEDSEHICPDRTIANHEGPKDDFEAPVVMPSPNDIQFLLEVEYKGDLLVTIGADLVLNYPVEKFMTLPVKLSISDIGLHSLCIVACLSKQLFLSFLCDVSDPALDDNQTVLDPKGPILAATKPLERISIVRSMKIETEIGEQYQGQGSVLRSVGELEQFLFTIFKDFLRKELAWPSWINLDFNDGDE

SEQ ID NO: 21115 - protein, 271 aa, Saccharomyces cerevisiae; identical to SEQ ID NO: 21114

SEQ ID NO: 21116 - protein, 271 aa, Saccharomyces cerevisiae; identical to SEQ ID NO: 21114

SEQ ID NO: 21117 - protein, 459 aa, Saccharomyces cerevisiae
MSFRFNEAVFGDNSFNERVREKLSTALNSPSKKKLDILKSGIKVQKVDFPTIPQLEILDLDIITQPKSLAKGICKISCKDAMLRIQTVIESNLLLISEQDTPSFTMPQLINNGSFTIPITMTFSSIELEAITNIFVKNPGIGISFNDVDLDFKFDCSVKILQSTIERRLKESMHVVFKDVLPSLIFNTSQNWFTNRGESTSTIPGKREHHHQQTTMSRNVILDGSDFQELSPINMLRLSSIVSSRSTLSLHSTVMNSLSAIPGCLERQNLYRFISRMPSLNNYYSSQSFPQPKSSTVSSKQLVKPFYCSHNLLPKTVLDSSQYDLATITKIQSRLFDRSNSNDDNAKPRRRKIKCKKTRTPSNLQSQGEQAVDDSTAIETVTSTPVQTPIPELEEQSPPYLKTTVSIRDKYVIPEKISLNLDSKKDTSKKKPFYFIGLNSQEPSNNWKWGMEDSPPPYH

SEQ ID NO: 21118 - protein, 459 aa, Saccharomyces cerevisiae
MSFRFNEAVFGDNSFNERVREKLSTALNSPSKKKLDILKSGIKVQKVDFPTIPQLEILDLDIITQPKSLAKGICKISCKDAMLRIQTVIESNLLLINEQDTPSFTMPQLINNGSFTIPITMTFSSIELEAITNIFVKNPGIGISFNDVDLDFKFDCSVKILQSTIERRLKESMHVVFKDVLPSLIFNTSQNWFTNRGESTSTIPGKREHHHQQTTMSRNVILDGSDFQELSPINMLRLSSIVSSRSTLSLHSTVMNSLSAIPGCLERQNLYRFISRMPSLNNYYSSQSFPQPKSSTVSSKQLVKPFYCSHNLLPKTVLDSSQYDLATITKIQSRLFDRSNSNDDNAKPRRRKIKCKKTRTPSNLQSQGEQAVDDSTAIETVTSTPVQTPIPELEEQSPPYLKTTVSIRDKYVIPEKISLNLDSKKDTSKKKPFYFIGLNSQEPSNNWKWGMEDSPPPYH

SEQ ID NO: 21119 - protein, 459 aa, Saccharomyces cerevisiae
MSFRFNEAVFGDNSFNERIREKLSTALNSPSKKKLDILKSGIKVQKVDFPTIPQLEILDLDIITQPKSLAKGICKISCKDAMLRIQTVIESNLLLINEQDTPSFTMPQLINNGSFTIPITMTFSSIELEAITNIFVKNPGIGISFNDVDLDFKFDCSVKILQSTIERRLKESMHVVFKDVLPSLIFNTSQNWFTNRGESTSTIPGKREHHHQQTTMSRNVILDGSDFQELSPINMLRLSSIVSSRSTLSLHSTVMNSLSAIPGCLERQNLYRFISRMPSLNNYYSSQSFPQPKSSTVSSKQLVKPFYCSHNLLPKTVLDSSQYDLATITKIQSRLFDRSNSNDDNAKPRRRKIKCKKTRTPSNLQSQGEQAVDDSTAIETVTSTPVQTPIPELEEQSPPYLKTTVSIRDKYVIPEKISLNLDSKKDTSKKKPFYFIGLNSQEPSNNWKWGMEDSPPPYH

SEQ ID NO: 21120 - protein, 459 aa, Saccharomyces cerevisiae; identical to SEQ ID NO: 21119

SEQ ID NO: 21121 - protein, 86 aa, Saccharomyces cerevisiae
MGNIMSASFAPECTDLKTKYDSCFNEWYSEKFLKGKSVENECSKQWYAYTTCVNAALVKQGIKPALDEAREEAPFENGGKLKEVDK

SEQ ID NO: 21122 - protein, 714 aa, Saccharomyces cerevisiae
MSVNDQITHIGKTLSTTASAFLNYQKSNSNTQDVLTNNGPYKNLLSNTVNNASSTSYFYKRTEHGRFVKNASNTFEDIYSKTRRGDVFRNKFTDNKTCFRMLTYISDDLLNEIPTKEGLKSDADGKLLTEGGENENLRKNASKKETSLFQGFKSYLPIAELAIENTERLNYDTNGTSGTVGAKDVMSKTNERDEIHTELPNFQDSFLIPPGVETKKISSSYSPSALKSFSQTLVNSLEFLNIQKNSTLSEIRDIEVEVENLRQKKEKLLGKIANIEQNQLLLEDNLKQIDDRLDFLEEYGLEVIEANSDENAEDDGMSERKALKNDAIRNEGVTTESISSEASNLPPRRRQQLRDDNSLNRLGAFYSKSKKRHRKSFPTFQQLYEPGTKIGSIMSTHDDFLTCLDFDAPFGTLCTAGYLDHTVKIWDLSKQNKIGELAGHLATINCMQINRDYGTLVTGGRDAALKLWNLNLAQQLYQETQNLTSPTNHIDSPCVYTFEAHTDEVTALSLDPSFLVSGSQDRTIRQWDLRSGKCLQTIDLSFANVLTTSTNVDLSKSTLLTQRNERPSIGALQSFDAALATGTKDGVVRLWDLRSGKVIRTLKGHTDAITSLKFDSACLVTGSYDRTVRIWDLRTGLLNKFHAYSAPVLSLDLFQENAAVVVADEPSVQIYDSEKDESWSCVEQGNETSVSTVKYKENYMVEGRENGDVNIWAV

SEQ ID NO: 21123 - protein, 714 aa, Saccharomyces cerevisiae
MSVNDQITHIGKTLSTTASAFLNYQKSNSNTQDVLTNNGPYKNLLSNTVNNASSTSYFYKRTEHGRFVKNASNTFEDIYSKTRRGDVFRNKFTDNKTCFRMLTYISDDLLNEIPTKEGLKSDADGKLLTEGGENENLRKNASKKETSLFQGFKSYLPIAELAIENTERLNYDTNGTSGTVGAKDVMSKTNERDEIHTELPNFQDSFLIPPGVETKKISSSYSPSALKSFSQTLVNSLEFLNIQKNSTLSEIRDIEVEVENLRQKKEKLLGKIANIEQNQLLLEDNLKQIDDRLDFLEEYGLEVIEANSDENAEDDGMSERKALKNDAIRNEGVTTESISSEASNLPPRRRQQLRDDNSLNRLGAFYSKSKKRHRKSFPTFQQLYEPGTKIGSIMSTHDDFLTCLDFDAPFGTLCTAGYLDHTVKIWDLSKQNKIGELAGHLATINCMQINRDYGTLVTGGRDAALKLWNLNLAQQLYQETQNLTSPTNHIDSPCVHTFEAHTDEVTALSLDPSFLVSGSQDRTIRQWDLRSGKCLQTIDLSFANVLTTSTNVDLSKSTLLTQRNERPSIGALQSFDAALATGTKDGVVRLWDLRSGKVIRTLKGHTDAITSLKFDSACLVTGSYDRTVRIWDLRTGLLNKFHAYSAPVLSLDLFQENAAVVVADEPSVQIYDSEKDESWSCVEQGNETSVSTVKYKENYMVEGRENGDVNIWAV

SEQ ID NO: 21124 - protein, 471 aa, Saccharomyces cerevisiae
MFAFYFLTACISLKGVFGVSPSYNGLGLTPQMGWDNWNTFACDVSEQLLLDTADRISDLGLKDMGYKYIILDDCWSSGRDSDGFLVADEQKFPNGMGHVADHLHNNSFLFGMYSSAGEYTCAGYPGSLGREEEDAQFFANNRVDYLKYDNCYNKGQFGTPEISYHRYKAMSDALNKTGRPIFYSLCNWGQDLTFYWGSGIANSWRMSGDVTAEFTRPDSRCPCDGDEYDCKYAGFHCSIMNILNKAAPMGQNAGVGGWNDLDNLEVGVGNLTDDEEKAHFSMWAMVKSPLIIGANVNNLKASSYSIYSQASVIAINQDSNGIPATRVWRYYVSDTDEYGQGEIQMWSGPLDNGDQVVALLNGGSVSRPMNTTLEEIFFDSNLGSKKLTSTWDIYDLWANRVDNSTASAILGRNKTATGILYNATEQSYKDGLSKNDTRLFGQKIGSLSPNAILNTTVPAHGIAFYRLRPSS

SEQ ID NO: 21125 - protein, 471 aa, Saccharomyces cerevisiae
MFAFYFLTACISLKGVFGVSPSYNGLGLTPQMGWDNWNTFACDVSEQLLLDTADRISDLGLKDMGYKYIILDDCWSSGRDSDGFLVADEQKFPNGMGHVADHLHNNSFLFGMYSSAGEYTCAGYPGSLGREEEDAQFFANNRVDYLKYDNCYNKGQFGTPEISYHRYKAMSDALNKTGRPIFYSLCNWGQDLTFYWGSGIANSWRMSGDITAEFTRPDSRCPCDGDEYDCKYAGFHCSIMNILNKAAPMGQNAGVGGWNDLDNLEVRVGNLTDDEEKAHFPMWAMVKSPLIIGADVNTLKPSSYSIYSQASVIAINQDPKGIPATRVWRYYVSDTDEYGQGEIQMWSGPLDNGDQVVALLNGGSVPRPMNTTLEEIFFDSNLGSKELTSTWDIYDLWANRVDNSTASAILGQNKTATGILYNATEQSYKDGLSKNDTRLFGQKIGSLSPNAILNTTVPAHGIAFYRLRPSA

SEQ ID NO: 21126 - protein, 471 aa, Saccharomyces cerevisiae
MFAFYFLTACTTLKGVFGVSPSYNGLGLTPQMGWDSWNTFACDVSEQLLLDTADRISDLGLKDMGYKYVILDDCWSSGRDSDGFLVADKHKFPNGMGHVADHLHNNSFLFGMYSSAGEYTCAGYPGSLGREEEDAQFFANNRVDYLKYDNCYNKGQFGTPDVSYHRYKAMSDALNKTGRPIFYSLCNWGQDLTFYWGSGIANSWRMSGDITAEFTRPDSRCPCDGDEYDCKYAGFHCSIMNILNKAAPMGQNAGVGGWNDLDNLEVGVGNLTDDEEKAHFSMWAMVKSPLIIGADVNHLKASSYSIYSQASVIAINQDPKGIPATRVWRYYVSDTDEYGQGEIQMWSGPLDNGDQVVALLNGGSVARPMNTTLEEIFFDSNLGSKELTSTWDIYDLWANRVDNSTASAILEQNKAATGILYNATEQSYKDGLSKNDTRLFGQKIGSLSPNAILNTTVPAHGIAFYRLRPSA

SEQ ID NO: 21127 - protein, 471 aa, Saccharomyces cerevisiae
MFAFYFLTACISLKGVFGVSPSYNGLGLTPQMGWDNWNTFACDVSEQLLLDTADRISDLGLKDMGYKYVILDDCWSSGRDSDGFLVADKHKFPNGMGHVADHLHNNSFLFGMYSSAGEYTCAGYPGSLGREEEDAQFFANNRVDYLKYDNCYNKGQFGTPDVSYHRYKAMSDALNKTGRPIFYSLCNWGQDLTFYWGSGIANSWRMSGDITAEFTRPDSRCPCDGDEYDCKYAGFHCSIMNILNKAAPMGQNAGVGGWNDLDNLEVGVGNLTDDEEKAHFSMWAMVKSPLIIGADVNHLKASSYSIYSQASVIAINQDPKGIPATRVWRYYVSDTDEYGQGEIQMWSGPLDNGDQVVALLNGGSVARPMNTTLEEIFFDSNLGSKELTSTWDIYDLWANRVDNSTASAILEQNKAATGILYNATEQSYKDGLSKNDTRLFGQKIGSLSPNAILNTTVPAHGIAFYRLRPSA

SEQ ID NO: 21128 - protein, 36 aa, Saccharomyces cerevisiae
MQPSTATAAPKEKTSSEKKDNYIIKGVFWDPACVIA

SEQ ID NO: 21129 - protein, 38 aa, Saccharomyces cerevisiae
MQPITTASTQATQKDKSSEKKDNYIIKGLFWDPACVIA

SEQ ID NO: 21130 - protein, 165 aa, Saccharomyces cerevisiae
MRFPSIFTAVLFAASSALAAPVNTTTEDETAQIPAEAVIGYLDLEGDFDVAVLPFSNSTNNGLLFINTTIASIAAKEEGVSLDKREAEAWHWLQLKPGQPMYKREAEAEAWHWLQLKPGQPMYKREADAEAWHWLQLKPGQPMYKREADAEAWHWLQLKPGQPMY

SEQ ID NO: 21131 - protein, 120 aa, Saccharomyces cerevisiae
MKFISTFLTFILAAVSVTASSDEDIAQVPAEAIIGYLDFGGDHDIAFLPFSNATASGLLFINTTIAEAAEKEQNTTLAKREAVADAWHWLNLRPGQPMYKREANADAWHWLQLKPGQPMY

SEQ ID NO: 21132 - protein, 313 aa, Saccharomyces cerevisiae
MAPYPYKVQTTVPELQYENFDGAKFGYMFWPVQNGTNEVRGRVLLIHGFGEYTKIQFRLMDHLSLNGYESFTFDQRGAGVTSPGRSKGVTDEYHVFNDLEHFVEKNLSECKAKGIPLFMWGHSMGGGICLNYACQGKHKNEISGYIGSGPLIILHPHTMYNKPTQIIAPLLAKFLPRVRIDTGLDLKGITSDKAYRAFLGSDPMSVPLYGSFRQIHDFMQRGAKLYKNENNYIQKNFAKDKPVIIMHGQDDTINDPKGSEKFIQDCPSADKELKLYPGARHSIFSLETDKVFNTVFNDMKQWLDKHTTTEAKP

SEQ ID NO: 21133 - protein, 121 aa, Saccharomyces cerevisiae
MSDILDEIVIEDVVANCPQEFLQYHKCIRDNEENPGKCKDGRMILSTCIREKVPSVKSIMSECSEPMKKYDQCIRDNMGTRTINENCLGFLQDLRKCAELQVKNKNIKPSINGVNLELIKD

SEQ ID NO: 21134 - protein, 156 aa, Saccharomyces cerevisiae
MARSRGSSRPISRSRPTQTRSASTMAAPVHPQQQQQPNAYSHPPAAGAQTRQPGMFAQMASTAAGVAVGSTIGHTLGAGITGMFSGSGSDSAPVEQQQQNMANTSGQTQTDQQLGRTCEIDARNFTRCLDENNGNFQICDYYLQQLKACQEAARQY

SEQ ID NO: 21135 - protein, 113 aa, Saccharomyces cerevisiae
MTEVVGFWESVSDDESEDKDCMEVQNTVSADESPLVQSLVSFVGSCSINLLLPFLNGMMLGFGELFAHELCWRFNWFNHRNKGYKVYPESRKIAALKEISSPGTRGRVASKFL

SEQ ID NO: 21136 - protein, 491 aa, Saccharomyces cerevisiae
MNSPTMKSEQLTPKLSPMSFCLDDQRNAGSFQNLLNSPTKLKLDTGPIGNSLLYPTSLSKLSELSRGGRSKQRRGSDTMRSVSPIRFQFLNNTPKMLKPEYLSQTTSNLPLLSALLKNSKKTTSEGQNSNPDPLNIEKNIIKQSIKDKLEQLRSSESVAQVQKKERNPPSFEAKVCAEEPILRKNAEGLLPSYVPVPATPLEDPENHGVRKVEDKGLRVVSGGSTQCLSTEVNELPKDLNLDNLPTDNNGFVQYGLKGNNNNNRYSFISSTSTDYEPEWCDGQQHISMQMASMANAEEANSREKSNLDIKIKQLELEITELKLQNEKLVHSMTTNRYIEERFMLEVMKDPSIQAQRSQRDIERKVKQLEKKFFNCKKVLKKLTESSAVVATSTSKTEGNSARIPCPKTRLARVSVLDLKKIEEQPDSSSGTSSEEDHLTNDDTDANTSEDLNVAFEEEPTSAISTTASVQSGESKRGFQLNLPVQVEKKEK

SEQ ID NO: 21137 - protein, 362 aa, Saccharomyces cerevisiae
MSRKFDLKTITDLSVLVGTGISLYYLVSRLLNDVESGPLSGKSRESKAKQSLQWEKLVKRSPALAEVTLDAYERTILSSIVTPDEINITFQDIGGLDPLISDLHESVIYPLMMPEVYSNSPLLQAPSGVLLYGPPGCGKTMLAKALAKESGANFISIRMSSIMDKWYGESNKIVDAMFSLANKLQPCIIFIDEIDSFLRERSSTDHEVTATLKAEFMTLWDGLLNNGRVMIIGATNRINDIDDAFLRRLPKRFLVSLPGSDQRYKILSVLLKDTKLDEDEFDLQLIADNTKGFSGSDLKELCREAALDAAKEYIKQKRQLIDSGTIDVNDTSSLKIRPLKTKDFTKKLRMDATSTLSSQPLD

SEQ ID NO: 21138 - protein, 1367 aa, Saccharomyces cerevisiae
MQRPFLLAYLVLSLLFNSALGFPTALVPRGSSEGTSCNSIVNGCPNLDFNWHMDQQNIMQYTLDVTSVSWVQDNTYQITIHVKGKENIDLKYLWSLKIIGVTGPKGTVQLYGYNENTYLIDNPTDFTATFEVYATQDVNSCQVWMPNFQIQFEYLQGSAAQYASSWQWGTTSFDLSTGCNNYDNQGHSQTDFPGFYWNIDCDNNCGGTKSSTTTSSTSESSTTTSSTSESSTTTSSTSESSTTTSSTSESSTSSSTTAPATPTTTSCTKEKPTPPTTTSCTKEKPTPPHHDTTPCTKKKTTTSKTCTKKTTTPVPTPSSSTTESSSAPVPTPSSSTTESSSAPVTSSTTESSSAPVPTPSSSTTESSSAPVTSSTTESSSAPVTSSTTESSSAPVPTPSSSTTESSSAPVTSSTTESSSAPVTSSTTESSSAPVTSSTTESSSAPVTSSTTESSSAPVPTPSSSTTESSSAPVTSSTTESSSAPVPTPSSSTTESSSAPVTSSTTESSSAPVPTPSSSTTESSSAPAPTPSSSTTESSSAPVTSSTTESSSAPVPTPSSSTTESSSTPVTSSTTESSSAPVPTPSSSTTESSSAPVPTPSSSTTESSSAPAPTPSSSTTESSSAPVTSSTTESSSAPVPTPSSSTTESSSAPVPTPSSSTTESSSAPVPTPSSSTTESSSAPVTSSTTESSSAPVTSSTTESSSAPVPTPSSSTTESSSAPVPTPSSSTTESSSAPVPTPSSSTTESSSAPVTSSTTESSSAPVPTPSSSTTESSSAPVPTPSSSTTESSSAPVPTPSSSTTESSVAPVPTPSSSSNITSSAPSSTPFSSSTESSSVPVPTPSSSTTESSSAPVSSSTTESSVAPVPTPSSSSNITSSAPSSIPFSSTTESFSTGTTVTPSSSKYPGSQTETSVSSTTETTIVPTKTTTSVTTPSTTTITTTVCSTGTNSAGETTSGCSPKTVTTTVPTTTTTSVTTSSTTTITTTVCSTGTNSAGETTSGCSPKTITTTVPCSTSPSETASESTTTSPTTPVTTVVSTTVVTTEYSTSTKPGGEITTTFVTKNIPTTYLTTIAPTPSVTTVTNFTPTTITTTVCSTGTNSAGETTSGCSPKTVTTTVPCSTGTGEYTTEATTLVTTAVTTTVVTTESSTGTNSAGKTTTGYTTKSVPTTYVTTLAPSAPVTPATNAVPTTITTTECSAATNAAGETTSVCSAKTIVSSASAGENTAPSATTPVTTAIPTTVITTESSVGTNSAGETTTGYTTKSIPTTYITTLIPGSNGAKNYETVATATNPISIKTTSQLATTASASSVAPVVTSPSLTGPLQSASGSAVATYSVPSISSTYQGAANIKVLGNFMWLLLALPVVF

SEQ ID NO: 21139 - protein, 284 aa, Saccharomyces cerevisiae
MAIDAQKLVVVIVIVVVPLLFKFIIGPKTKPVLDPKRNDFQSFPLVEKTILTHNTSMYKFGLPHADDVLGLPIGQHIVIKANINGKDITRSYTPTSLDGDTKGNFELLVKSYPTGNVSKMIGELKIGDSIQIKGPRGNYHYERNCRSHLGMIAGGTGIAPMYQIMKAIAMDSHDTTKVSLVFGNVHEEDILLKKELEALVAMKPSQFKIVYYLDSPDREDWAGGVGYITKDVIKEHLPAATVDNVQILICGPPAMVASVRRSTVDLGFRRSKPLSKMEDQVFVF

SEQ ID NO: 21140 - protein, 284 aa, Saccharomyces cerevisiae
MAIDAQKLVVVIVIVVVPLLFKFIIGPKTKPVLDPKRNDFQSFPLVEKTILTHNTSMYKFGLPHADDVLGLPIGQHIVIKANINGKDITRSYTPTSLDGDTKGNFELLVKSYPTGNVSKMIGELKIGDSIQIKGPRGNYHYERNCRSHLGMIAGGTGIAPMYQIMKAIAMDPHDTTKVSLVFGNVHEEDILLKKELEALVAMKPSQFKIVYYLDSPDREDWTGGVGYITKDVIKEHLPAATMDNVQILICGPPAMVASVRRSTVDLGFRRSKPLSKMEDQVFVF

SEQ ID NO: 21141 - protein, 691 aa, Saccharomyces cerevisiae
MPFGIDNTDFTVLAGLVLAVLLYVKRNSIKELLMSDDGDITAVSSGNRDIAQVVTENNKNYLVLYASQTGTAEDYAKKFSKELVAKFNLNVMCADVENYDFESLNDVPVIVSIFISTYGEGDFPDGAVNFEDFICNAEAGALSNLRYNMFGLGNSTYEFFNGAAKKAEKHLSAAGAIRLGKLGEADDGAGTTDEDYMAWKDSILEVLKDELHLDEQEAKFTSQFQYTVLNEITDSMSLGEPSAHYLPSHQLNRNADGIQLGPFDLSQPYIAPIVKSRELFSSNDRNCIHSEFDLSGSNIKYSTGDHLAVWPSNPLEKVEQFLSIFNLDPETIFDLKPLDPTVKVPFPTPTTIGAAIKHYLEITGPVSRQLFSSLIQFAPNADVKEKLTLLSKDKDQFAVEITSKYFNIADALKYLSDGAKWDTVPMQFLVESVPQMTPRYYSISSSSLSEKQTVHVTSIVENFPNPELPDAPPVVGVTTNLLRNIQLAQNNVNIAETNLPVHYDLNGPRKLFANYKLPVHVRRSNFRLPSNPSTPVIMIGPGTGVAPFRGFIRERVAFLESQKKGGNNVSLGKHILFYGSRNTDDFLYQDEWPEYAKKLDGSFEMVVAHSRLPNTKKVYVQDKLKDYEDQVFEMINNGAFIYVCGDAKGMAKGVSTALVGILSRGKSITTDEATELIKMLKTSGRYQEDVW

SEQ ID NO: 21142 - protein, 560 aa, Saccharomyces cerevisiae
MIRQSLMKTVWANSSRFSLQSKSGLVKYAKNRSFHAARNLLEDKKVILQKVAPTTGVVAKQSFFKRTGKFTLKALLYSALAGTAYVSYSLYREANPSTQVPQSDTFPNGSKRKTLVILGSGWGSVSLLKNLDTTLYNVVVVSPRNYFLFTPLLPSTPVGTIELKSIVEPVRTIARRSHGEVHYYEAEAYDVDPENKTIKVKSSAKNNDYDLDLKYDYLVVGVGAQPNTFGTPGVYEYSSFLKEISDAQEIRLKIMSSIEKAASLSPKDPERARLLSFVVVGGGPTGVEFAAELRDYVDQDLRKWMPELSKEIKVTLVEALPNILNMFDKYLVDYAQDLFKEEKIDLRLKTMVKKVDATTITAKTGDGDIENIPYGVLVWATGNAPREVSKNLMTKLEEQDSRRGLLIDNKLQLLGAKGSIFAIGDCTFHPGLFPTAQVAHQEGEYLAQYFKKAYKIDQLNWKMTHAKDDSEVARLKNQIVKTQSQIEDFKYNHKGALAYIGSDKAIADLAVGEAKYRLAGSFTFLFWKSAYLAMCLSFRNRVLVAMDWAKVYFLGRDSSI

SEQ ID NO: 21143 - protein, 545 aa, Saccharomyces cerevisiae
MLPRLGFARTARSIHRFKMTQISKPFFHSTEVGKPGPQQKLSKSYTAVFKKWFVRGLKLTFYTTLAGTLYVSYELYKESNPPKQVPQSTAFANGLKKKELVILGTGWGAISLLKKLDTSLYNVTVVSPRSFFLFTPLLPSTPVGTIEMKSIVEPVRSIARRTPGEVHYIEAEALDVDPKAKKVMVQSVSEDEYFVSSLSYDYLVVSVGAKTTTFNIPGVYGNANFLKEIEDAQNIRMKLMKTIEQASSFPVNDPERKRLLTFVVVGGGPTGVEFAAELQDYINQDLRKWMPDLSKEMKVILIEALPNILNMFDKTLIKYAEDLFARDEIDLQVNTAVKVVEPTYIRTLQNGQTNTDIEYGMLVWATGNEPIDFSKTLMSRIPEQTNRRGLLINDKLELLGSENSIYAIGDCTAHTGFFPTAQVAHQEGEYLAKILDKKLQIEQLEWDMLNSTDETEVSRLQKEVNLRKSKLDKFNYKHMGALAYIGSETAIADLHMGDSSYQLKGMFAFLFWKSAYLAMCLSIRNRILIAMDWTKVYFLGRDSSV

SEQ ID NO: 21144 - protein, 153 aa, Saccharomyces cerevisiae
MSSQTERTFIAVKPDGVQRGLVSQILSRFEKKGYKLVAIKLVKADDKLLEQHYAEHVGKPFFPKMVSFMKSGPILATVWEGKDVVRQGRTILGATNPLGSAPGTIRGDFGIDLGRNVCHGSDSVDSAEREINLWFKKEELVDWESNQAKWIYE

SEQ ID NO: 21145 - protein, 321 aa, Saccharomyces cerevisiae
MTRPPLVRGIFSLGLSVAVLKGVEKTVRKHLERQGWIEPQKVDYELIFTIDRLKNLVDNKREALTAEQPDAGELSWRKVFNFISRQSSELDARIYVLILLLSFLLPIAWTVLDGDRETTLEDKDNDCNVDLIENERRLKHYNDGERAVLQFGKNRSEPIILSYKDMNVLEGEHEFTSKEEHSNSHLTSKSENALSQVGSEDLLGCHLEKQLEEDKNEPNGEADGEDDNNREKDCSSSSEVESQSKCRKESTAEPDSLSRDTRTTSSLKSSTSFPISFKGSIDLKSLNQPSSLLHIQVSPTKSSNLDAQVNTEQAYSQPFRY

SEQ ID NO: 21146 - protein, 321 aa, Saccharomyces cerevisiae
MTRPPLVRGIFSLGLSVAVLKGVEKTVRKHLERQGWIEPQKVDYELIFTIDRLKNLVDNKREALTAEQPDAGELSWRKVFNFISRQSSELDTRIYVLILLLSFLLPIAWTVLDGDRETTLEDKDNDCNVDLIENERRLKHYNDGERAVLQFGKNRSEPIILSYKDMNVLEGEHEFTSKEEHSNSHLTSKSENALNQVGSEDLLGCHLEKQLEEDKNEPNGEADGEDDNNREKDCSSSSEVESQSKCRKESTAEPDSLSRDTRTTSSLKSSTSFPISFKGSIDLKSLNQPSSLLHIQVSPTKSSNLDAQVNTEQAYSQPFRY

SEQ ID NO: 21147 - protein, 134 aa, Saccharomyces cerevisiae
MSATAKHDSNASPNSDSEDGHHHNNKKECAIEYLKARLNSASAVACGYLQAFVSKTQDFAKVCFLELQNPVVLVNLLLHSSVVCYLCNGYANHNARFLKGKPNSTVLATTAGALGLLTLDGIISKKYYSRYDKK

SEQ ID NO: 21148 - protein, 134 aa, Saccharomyces cerevisiae; identical to SEQ ID NO: 21147

SEQ ID NO: 21149 - protein, 393 aa, Saccharomyces cerevisiae
MSSRIIVGSAALAAAITASIMVREQKAKGQRREGNVSAYYNGQEYGSSAPPQLGKLHNIKQGIKEDALSLKDALLGVSQKAREEAPKVTKRVISPEEDAQTRKQLGQKAKDSSSQSIFNWGFSEAERRKAIAIGEFDTAKKRFEEAVDRNEKELLSTVMREKKAALDRASIEYERYGRARDFNELSDKLDQQERNSNPLKRLLKNNTGDANTEEAAARSVQGWGDTAQEFGREELEEAKRNASSEPSEAQKRLDELKKIKEKGWFGYNKGEQSEQQIAERVARGLEGWGETAAQLSKDEMDDLRWNYENSKKQLDKNVSDAMDSLSKAKEDLKQYGSHWWSGWTSKVDNDKQALKDEAQKKYDEALKKYDEAKNKFKEWNDKGDGKFWSSKKD

SEQ ID NO: 21150 - protein, 1188 aa, Saccharomyces cerevisiae
MEQPDLSSVAISKPLLKLKLLDALRQGSFPNLQDLLKKQFQPLDDPNVQQVLHLMLHYAVQVAPMAVIKEIVHHWVSTTNTTFLNIHLDLNERDSNGNTPLHIAAYQSRGDIVAFLLDQPTINDCVLNNSHLQAIEMCKNLNIAQMMQVKRSTYVAETAQEFRTAFNNRDFGHLESILSSPRNAELLDINGMDPETGDTVLHEFVKKRDVIMCRWLLEHGADPFKRDRKGKLPIELVRKVNENDTATNTKIAIDIELKKLLERATREQSVIDVTNNNLHEAPTYKGYLKKWTNFAQGYKLRWFILSSDGKLSYYIDQADTKNACRGSLNMSSCSLHLDSSEKLKFEIIGGNNGVIRWHLKGNHPIETNRWVWAIQGAIRYAKDREILLHNGPYSPSLALSHGLSSKVSNKENLHATSKRLTKSPHLSKSTLTQNDHDNDDDSTNNNNNKSNNDYDDNNNNNNNDDDDYDDDDESRPLIEPLPLISSRSQSLSEITPGPHSRKSTVSSTRAADIPSDDEGYSEDDSDDDGNSSYTMENGGENDGDEDLNAIYGPYIQKLHMLQRSISIELASLNELLQDKQQHDEYWNTVNTSIETVSEFFDKLNRLTSQREKRMIAQMTKQRDVNNVWIQSVKDLEMELVDKDEKLVALDKERKNLKKMLQKKLNNQPQVETEANEESDDANSMIKGSQESTNTLEEIVKFIEATKESDEDSDADEFFDAEEAASDKKANDSEDLTTNKETPANAKPQEEAPEDESLIVISSPQVEKKNQLLKEGSFVGYEDPVRTKLALDEDNRPKIGLWSVLKSMVGQDLTKLTLPVSFNEPTSLLQRVSEDIEYSHILDQAATFEDSSLRMLYVAAFTASMYASTTNRVSKPFNPLLGETFEYARTDGQYRFFTEQVSHHPPISATWTESPKWDFYGECNVDSSFNGRTFAVQHLGLWYITIRPDHNISVPEETYSWKKPNNTVIGILMGKPQVDNSGDVKVTNHTTGDYCMLHYKAHGWTSAGAYEVRGEVFNKDDKKLWVLGGHWNDSIYGKKVTARGGELTLDRIKTANSATGGPKLDGSKFLIWKANERPSVPFNLTSFALTLNALPPHLIPYLAPTDSRLRPDQRAMENGEYDKAAAEKHRVEVKQRAAKKEREQKGEEYRPKWFVQEEHPVTKSLYWKFNGEYWNKRKNHDFKDCADIF

SEQ ID NO: 21151 - protein, 124 aa, Saccharomyces cerevisiae
MVKLTSIVAGVAAIAAGVAAAPATTTLSPSDERVNLVELGVYVSDIRAHLAEYYMFQAAHPTETYPVEIAEAVFNYGDFTTMLTGIPADQVTRVITGVPWYSTRLRPAISSALSKDGIYTAVPN

SEQ ID NO: 21152 - protein, 120 aa, Saccharomyces cerevisiae
MVKLTSIAAGVAAIAATASATTTLAQSDERVNLVELGVYVSDIRAHLAQYYSFQVAHPTETYPVEIAEAVFNYGDFTTMLTGIAPDQVTRMITGVPWYSSRLKPAISSALSKDGIYTIAN

SEQ ID NO: 21153 - protein, 361 aa, Saccharomyces cerevisiae
MISANSLLISTLCAFAIATPLSKRDSCTLTGSSLSSLSTVKKCSSIVIKDLTVPAGQTLDLTGLSSGTTVTFEGTTTFQYKEWSGPLISISGSKISVVGASGHTIDGQGAKWWDGLGDSGKVKPKFVKLALTGTSKVTGLNIKNAPHQVFSINKCSDLTISDITIDIRDGDSAGGHNTDGFDVGSSSNVLIQGCTVYNQDDCIAVNSGSTIKFMNNYCYNGHGISVGSVGGRSDNTVNGFWAENNHVINSDNGLRIKTVEGATGTVTNVNFISNKISGIKSYGIVIEGDYLNSKTTGTATGGVPISNLVMKDITGSVNSTAKRVKILVKNATNWQWSGVSITGGSSYSGCSGIPSGSGASC

SEQ ID NO: 21154 - protein, 341 aa, Saccharomyces cerevisiae
MQYKKSLVASALVTTSLAAYAPKDPWSTLTPSATYKGGITDYSSTFGIAVEPIATTASSKAKRAAAISQIGDGQIQATTKTTAAAVSQIGDGQIQATTKTKAAAVSQIGDGQIQATTKTTSAKTTAAAVSQIGDGQIQATTKTKAAAVSQIGDGQIQATTKTTAAAVSQIGDGQIQATTKTTAAAVSQIGDGQIQATTNTTVAPVSQITDGQIQATTLTSATIIPSPAPAPITNGTDPVTAETCKSSGTLEMNLKGGILTDGKGRIGSIVANRQFQFDGPPPQAGAIYAAGWSITPEGNLAIGDQDTFYQCLSGNFYNLYDEHIGTQCNAVHLQAIDLVNC

SEQ ID NO: 21155 - protein, 341 aa, Saccharomyces cerevisiae
MQYKKSLVASALVATSLAAYAPKDPWSTLTPSATYKGGITDYSSTFGIAVEPIATTASSKAKRAAAISQIGDGQIQATTKTTAAAVSQIGDGQIQATTKTKAAAVSQIGDGQIQATTKTTSAKTTAAAVSQIGDGQIQATTKTKAAAVSQIGDGQIQATTKTTAAAVSQIGDGQIQATTKTTAAAVSQIGDGQIQATTNTTVAPVSQITDGQIQATTLTSATIIPSPAPAPITNGTDPVTAETCKSSGTLEMNLKGGILTDGKGRIGSIVANRQFQFDGPPPQAGAIYAAGWSITPEGNLAIGDQDTFYQCLSGNFYNLYDEHIGTQCNAVHLQAIDLVNC

SEQ ID NO: 21156 - protein, 341 aa, Saccharomyces cerevisiae
MQYKKSLVASALVATSLAAYAPKDPWSTLTPSATYKGGITDYSSTFGIAVEPIATTASSKAKRAAAISQIGDGQIQATTKTTAAAVSQIGDGQIQATTKTKAAAVSQIGDGQIQATTKTTSAKTTAAAVSQIGDGQIQATTKTKAAAVSQIGDGQIQATTKTTAAAVSQIGDGQIQATTKTTAAAVSQIGDGQIQATTNTTVAPVSQITDGQIQATTLTSATIIPSPAPAPITNGTDPVTAETCKSSGTLEMNLKGGILTDGKGRIGSIVANRQFQFDGPPPQAGAIYAAGWSITPEGNLAIGDQDTFYQCLSGNFYNLYDEHIGTQCNAVHLQAIDLLNC

SEQ ID NO: 21157 - protein, 307 aa, Saccharomyces cerevisiae
MQYKKPLVVSALAATSLAAYAPKDPWSTLTPSATYKGGITDYSSSFGIAIEAVATSASSVASSKAKRAASQIGDGQVQAATTTAAVSKKSTAAAVSQITDGQVQAAKSTAAAASQISDGQVQAAKSTAAAVSQITDGQVQAAKSTAAAASQISDGQVQATTSTKAAASQITDGQIQASKTTSGASQVSDGQVQATAEVKDANDPVDVVSCNNNSTLSMSLSKGILTDRKGRIGSIVANRQFQFDGPPPQAGAIYAAGWSITPEGNLALGDQDTFYQCLSGDFYNLYDKHIGSQCHEVYLQAIDLIDC

SEQ ID NO: 21158 - protein, 415 aa, Saccharomyces cerevisiae
MQYKKPLVVSALAATSLAAYAPKDPWSTLTPSATYKGGITDYSSSFGIAIEAVATSASSVASSKAKRAASQIGDGQVQAATTTAAVSKKSTAAAVSQITDGQVQAAKSTAAAASQISDGQVQAAKSTAAAVSQITDGQVQAAKSTAAAVSQITDGQVQAAKSTAAAVSQITDGQVQAAKSTAAAVSQITDGQVQAAKSTAAAASQISDGQVQAAKSTAAAASQISDGQVQAAKSTAAAASQISDGQVQAAKSTAAAASQISDGQVQATTSTKAAASQITDGQIQASKTTSGASQVSDGQVQATAEVKDANDPVDVVSCNNNSTLSMSLSKGILTDRKGRIGSIVANRQFQFDGPPPQAGAIYAAGWSITPEGNLALGDQDTFYQCLSGDFYNLYDKHIGSQCHEVYLQAIDLIDC

SEQ ID NO: 21159 - protein, 325 aa, Saccharomyces cerevisiae
MQYKKPLVVSALAATSLAAYAPKDPWSTLTPSATYKGGITDYSSSFGIAIEAVATSASSVASSKAKRAASQIGDGQVQAATTTAAVSKKSTAAAVSQITDGQVQAAKSTAAAVSQITDGQVQAAKSTAAAVSQITDGQVQAAKSTAAAVSQITDGQVQAAKSTAAAASQISDGQVQATTSTKAAASQITDGQIQASKTTSGASQVSDGQVQATAEVKDANDPVDVVSCNNNSTLSMSLSKGILTDRKGRIGSIVANRQFQFDGPPPQAGAIYAAGWSITPEGNLALGDQDTFYQCLSGDFYNLYDKHIGSQCHEVYLQAIDLIDC

SEQ ID NO: 21160 - protein, 287 aa, Saccharomyces cerevisiae
MHYKKAFLASLLSSIALTAYAPPEPWATLTPSSKMDGGTTEYRTSFGLAVIPFTVTESKVKRNVISQINDGQVQVTTQKLPHPVSQIGDGQIQVTTQKVPPVVSHIVSQIGDGQLQITTAKNVVTKSTIAVPSKTATATATSTATAVSQIHDGQVQVTISSASSSSVLSKSKLEPTKKPNNENVIKVQACKSSGTLAITLQGGVLIDSNGRIGSIVANRQFQFDGPPPQAGAIYAGGWSITKHGTLAIGDNDVFYQCLSGTFYNLYDQSIGGQCNPVHLQTVGLVDC

SEQ ID NO: 21161 - protein, 287 aa, Saccharomyces cerevisiae; identical to SEQ ID NO: 21160

SEQ ID NO: 21162 - protein, 287 aa, Saccharomyces cerevisiae
MHYKKAFLASLLSSIALTAYAPPEPWATLTPSSKMDGGTTEYRTSFGLAVIPFTVTESKVKRNVISQINDGQVQVTTQKLPHPVSQIGDGQIQVTTQKVPPVVSHIVSQIGDGQLQITTAKNVVTKSTIAVPSKTVTATATSTATAVSQIHDGQVQVTISSASSSSVLSKSKLEPTKKPNNEKVIKVQACKSSGTLAITLQEGVLIDSSGRIGSIVANRQFQFDGPPPQAGAIYAGGWSITKHGTLAIGDNDVFYQCLSGTFYNLYDQSIGGQCNPVHLQTVGLVDC

SEQ ID NO: 21163 - protein, 287 aa, Saccharomyces cerevisiae
MHYKKAFLASLLSSIALTAYAPPEPWATLTPSSKMDGGTTEYRTSFGLAVIPFTVTESKVKRNVISQINDGQVQVTTQKLPHPVSQIGDGQIQVTTQKVPPVVSHIVSQIGDGQLQITTAKNVVTKSTIAVPSKTVTATATSTATAVSQIHDGQVQVTISSASSSSVLSKSKLEPTKKPNNEKVIKVQACKSSGTLAITLQGGVLIDSSGRIGSIVANRQFQFDGPPPQAGAIYAGGWSITKHGTLAIGDNDVFYQCLSGTFYNLYDQSIGGQCNPVHLQTVGLVDC

SEQ ID NO: 21164 - protein, 220 aa, Saccharomyces cerevisiae
MSSNSTPEKVTAEHVLWYIPNKIGYVRVITAALSFFVMKNHPTAFTWLYSTSCLLDALDGTMARKYNQVSSLGAVLDMVTDRSSTAGLMCFLCVQYPQWCVFFQLMLGLDITSHYMHMYASLSAGKTSHKSVGEGESRLLHLYYTRRDVLFTICAFNELFYAGLYLQLFSNSATFGKWTTIISFPGYVFKQTANVVQLKRAALILADNDAKNANEKNKTY

SEQ ID NO: 21165 - protein, 706 aa, Saccharomyces cerevisiae
MQLRNILQASSLISGLSLAADSSSTTGDGYAPSIIPCPSDDTSLVRNASGLSTAETDWLKKRDAYTKEALHSFLSRATSNFSDTSLLSTLFSSNSSNVPKIGIACSGGGYRAMLGGAGMIAAMDNRTDGANEHGLGGLLQSSTYLSGLSGGNWLTGTLAWNNWTSVQEIVDHMSESDSIWNITKSIVNPGGSNLTYTIERWESIVQEVQAKSDAGFNISLSDLWARALSYNFFPSLPDAGSALTWSSLRDVDVFKNGEMPLPITVADGRYPGTTVINLNATLFEFTPFEMGSWDPSLNAFTDVKYLGTNVTNGKPVNKDQCVSGYDNAGFVIATSASLFNEFSLEASTSTYYKMINSFANKYVNNLSQDDDDIAIYAANPFKDTEFVDRNYTSSIVDADDLFLVDGGEDGQNLPLVPLIKKERDLDVVFALDISDNTDESWPSGVCMTNTYERQYSKQGKGMAFPYVPDVNTFLNLGLTNKPTFFGCDAKNLTDLEYIPPLVVYIPNTKHSFNGNQSTLKMNYNVTERLGMIRNGFEAATMGNFTDDSNFLGCIGCAIIRRKQESLNATLPPECTKCFADYCWNGTLSTSANPELSGNSTYQSGAIASAISEATDGIPITALLGSSTSGNTTSNSTTSTSSNVTSNSNSSSNTTLNSNSSSSSISSSTARSSSSTANKANAAAISYANTNTLMSLLGAITALFGLI

SEQ ID NO: 21166 - protein, 686 aa, Saccharomyces cerevisiae
MIRPLCSKIIISYIFAISQFLLAANAWSPTDSYVPGTVSCPDDINLVREATSISQNESAWLEKRNKVTSVALKDFLTRATANFSDSSEVLSKLFNDGNSENLPKIAVAVSGGGYRSMLTGAGVLAAMDNRTEGAYEHGLGGLLQSTTYLSGASGGNWLVGTLALNNWTSVQDILNNMQNDDSIWDLSDSIVTPGGINIFKTAKRWDHISNAVESKQNADYNTSLADIWGRALAYNFFPSLNRGGIGLTWSSIRDFPVFQNAEMPFPISVADGRYPGTKVINLNATVFEFNPFEMGSWDPSLNSFANVKYLGTNVSNGVPLERGKCTAGFDNAGFIMGTSSTLFNQFLLRINSTHLPSFITRLARHFLKDLSQDFNDIAVYSPNPFKDTKFLDSDYTTSIVDSDSLFLVDGGEDDENVPVLPLIQKERDVDIIFAVDNSADMRLAWPDGSSLVHTYERQFVKQGQGMSFPYVPDTNTFVNLGLNKKPTFFGCDANNLTDLQYIPPLVVYLPNAEYSFNSNQSAFKLSYSESQRRSMIQNGFEIATRNNFTDDPEFMGCVGCAIIRRKQQALNITLPPECETCFKNYCWNGTLDTTPLPDVEKDVHHSFINVNSFNSSIGQEESLYAGSSASQSSSSSSSSSSSSEIPSATATLEKKAATNSGSHLSGISVKFSAMIMLTLLMFTGAV

SEQ ID NO: 21167 - protein, 467 aa, Saccharomyces cerevisiae
MFKSVVYSILAASLANAGTIPLGKLADVDKIGTQKDIFPFLGGAGPYYSFPGDYGISRDLPEGCEMKQLQMVGRHGERYPTVSLAKTIKSTWYKLSNYTRQFNGSLSFLNDDYEFFIRDDDDLEMETTFANSDDVLNPYTGEMNAKRHARDFLAQYGYMVENQTSFAVFTSNSKRCHDTAQYFIDGLGDQFNITLQTVSEAESAGANTLSACNSCPAWDYDANDDIVNEYDTTYLDDIAKRLNKENKGLNLTSTDASTLFSWCAFEVNAKGYSDVCDIFTKDELVHYSYYQDLHTYYHEGPGYDIIKSVGSNLFNASVKLLKQSEIQDQKVWLSFTHDTDILNFLTTAGIIDDKNNLTAEYVPFMGNTFHRSWYVPQGARVYTEKFQCSNDTYVRYVINDAVVPIETCSTGPGFSCEINDFYDYAEKRVAGTDFLKVCNVSSVSNSTELTFYWDWNTTHYNASLLRQ

SEQ ID NO: 21168 - protein, 467 aa, Saccharomyces cerevisiae
MLKSAVYSILAASLVNAGTIPLGKLSDIDKIGTQTEIFPFLGGSGPYYSFPGDYGISRDLPESCEMKQVQMVGRHGERYPTVSKAKSIMTTWYKLSNYTGQFSGALSFLNDDYEFFIRDTKNLEMETTLANSVNVLNPYTGEMNAKRHARDFLAQYGYMVENQTSFAVFTSNSNRCHDTAQYFIDGLGDKFNISLQTISEAESAGANTLSAHHSCPAWDDDVNDDILKKYDTKYLSGIAKRLNKENKGLNLTSSDANTFFAWCAYEINARGYSDICNIFTKDELVRFSYGQDLETYYQTGPGYDVVRSVGANLFNASVKLLKESEVQDQKVWLSFTHDTDILNYLTTIGIIDDKNNLTAEHVPFMENTFHRSWYVPQGARVYTEKFQCSNDTYVRYVINDAVVPIETCSTGPGFSCEINDFYDYAEKRVAGTDFLKVCNVSSVSNSTELTFFWDWNTKHYNDTLLKQ

SEQ ID NO: 21169 - protein, 133 aa, Saccharomyces cerevisiae
MTAMKEDNAALITLKKNNDQEKLRVHKLTDASSNSADGFVINKAKNGGPLNKKSLVNNEQHIKKAVSPGRVRKHKTTTSSTKSRTKSKKKDASESKVQRENKGSFYQGAIFGSFLGAAVTTVLSNLAVKALQN

SEQ ID NO: 21170 - protein, 299 aa, Saccharomyces cerevisiae
MKLSKLSILTSALATSALAAPAVVTVTEHAHEAAVVTVQGVVYVENGQTRTTYETLAPASTATPTSTATALVAPPVAPSSASSNSDVVLSALKNLASVWGKTTDSTTTLTSSESTSQSLAQATTTSTPAAASTTSTPAATTTTSQAAATSSASSSDSDLSDFASSVLAEHNKKRALHKDTPALSWSDTLASYAQDYADNYDCSGTLTHSGGPYGENLALGYDGPAAVDAWYNEISNYDFSNPGFSSNTGHFTQVVWKSTTQVGCGIKTCGGAWGDYVICSYDPAGNYEGEYADNVEPLA

SEQ ID NO: 21171 - protein, 329 aa, Saccharomyces cerevisiae
MKFSKVSLLAASASVALSAPVAVTVTQHVHQAATVVVQGIVRVENGQTLTTFITKGTQTASASPVATTSAPIVVANAQVDSIATSVIQESAVVAESATFEESSTETSEAFSTATATIQAVQTSASATQDDVTTTLTSSTQPTSTTTPTTTTTSPTTTTSPTTTASPTTTASPTTATTTQSTASSTQSSSSDFSTSMVNEHNTKRALHKDTGSLTWSDTLATYAQNYADSYDCSGNLVHSGGPYGENLALGYGTTGSVDAWYNEITSYDYSNPGFSESAGHFTQVVWKGTSEVGCGLKSCGGEWGDYIICSYKAAGNVIGEFADNVMPLA

SEQ ID NO: 21172 - protein, 881 aa, Saccharomyces cerevisiae
MLEFPISVLLGCLVAVKAQTTFPNFESDVLNEHNKFRALHVDTAPLTWSDTLATYAQNYADQYDCSGVLTHSDGPYGENLALGYTDTGAVDAWYGEISKYNYSNPGFSESTGHFTQVVWKSTAEIGCGYKYCGTTWNNYIVCSYNPPGNYLGEFAEEVEPLISTVSSSSSSSSSTSTTSDTVSTISSSIMPAVAQGYTTTVSSAASSSSLKSTTINPAKTATLTASSSTVITSSTESVGSSTVSSASSSSVTTSYATSSSTVVSSDATSSTTTTSSVATSSSTTSSDPTSSTAAASSSDPASSSAAASSSASTENAASSSSAISSSSSMVSAPLSSTLTTSTASSRSVTSNSVNSVKFANTTVFSAQTTSSVSASLSSSVAADDIQGSTSKEATSSVSEHTSIVTSATNAAQYATRLGSSSRSSSGAVSSSAVSQSVLNSVIAVNTDVSVTSVSSTAHTTKDTATTSVTASESITSETAQASSSTEKNISNSAATSSSIYSNSASVSGHGVTYAAEYAITSEQSSALATSVPATNCSSIVKTTTLENSSTTTITAITKSTTTLATTANNSTRAATAVTIDPTLDPTDNSASPTDNAKHTSTYGSSSTGASLDSLRTTTSISVSSNTTQLVSTCTSESDYSDSPSFAISTATTTESNLITNTITASCSTDSNFPTSAASSTDETAFTRTISTSCSTLNGASTQTSELTTSPMKTNTVVPASSFPSTTTTCLENDDTAFSSIYTEVNAATIINPGETSSLASDFATSEKPNEPTSVKSTSNEGTSSTTTTYQQTVATLYAKPSSTSLGARTTTGSNGRSTTSQQDGSAMHQPTSSIYTQLKEGTSTTAKLSAYEGAATPLSIFQCNSLAGTIAAFVVAVLFAF

SEQ ID NO: 21173 - protein, 276 aa, Saccharomyces cerevisiae
MVESDEDFAPQEFPHTDTDVIVNEHRDENDGYASDEVGGTLSRRASSIFSINTTPLAPPNATDIQKFTSDEHHFSMMRNLHMADYITMLNGFSGFYSIVSCLRFTLTGKPHYVQRAHFFILLGMCFDFLDGRVARLRNRSSLMGQELDSLADLVSFGVAPAAIAFAIGFQTTFDVMILSFFVLCGLARLARFNVTVAQLPKDSSTGKSKYFEGLPMPTTLALVLGMAYCVRKGLIFDNIPFGIFREDQILEFHPIILVFFIHGCGMISKSLKIPKP

SEQ ID NO: 21174 - protein, 444 aa, Saccharomyces cerevisiae
MQLHSLIASTALLITSALAATSSSSSIPSSCTISSHATATAQSDLDKYSRCDTLVGNLTIGGGLKTGALANVKEINGSLTIFNATNLTSFAADSLESITDSLNLQSLTILTSASFGSLQSVDSIKLITLPAISSFTSNIKSANNIYISDTSLQSVDGFSALKKVNVFNVNNNKKLTSIKSPVETVSDSLQFSFNGNQTKITFDDLVWANNISLTDVHSVSFANLQKINSSLGFINNSISSLNFTKLNTIGQTFSIVSNDYLKNLSFSNLSTIGGALVVANNTGLQKIGGLDNLTTIGGTLEVVGNFTSLNLDSLKSVKGGADVESKSSNFSCNALKALQKKGGIKGESFVCKNGASSTSVKLSSTSKSQSSQTTAKVSKSSSKAEEKKFTSGDIKAAASASSVSSSSASSSSSKSSKGNAAIMAPIGQTTPLVGLLTAIIMSIM

SEQ ID NO: 21175 - protein, 444 aa, Saccharomyces cerevisiae
MQLHSLIASTALLITSALAATSSSSSIPSSCTISSHATATAQSDLDKYSRCDTLVGNLTIGGGLKTGALANVKEINGSLTIFNATNLTSFAADSLESITDSLNLQSLTILTSASFGSLQSVDSIKLITLPAISSFTSNIKSANNIYISDTSLQSVDGFSALKKVNVFNVNNNKKLTSIKSPVETVSDSLQFSFNGNQTKITFDDLVWANNISLTDVHSVSFANLQKINSSLGFINNSISSLNFTKLNTIGQTFSIVSNDYLKNLSFSNLSTIGGALVVANNTGLQKIGGLDNLTTIGGTLEVVGNFTSLNLDSLKSVKGGADVESKSSNFSCNALKALQKKGGIKGESFVCKNGASSTSVKLSSTSKSQSSQTTAKVSKSSSKAEEKKFTSGDIKAAASASSVSSSGASSSSSKSSKGNAAIMAPIGQTTPLVGLLTAIIMSIM

SEQ ID NO: 21176 - protein, 198 aa, Saccharomyces cerevisiae
MPRVAIIIYTLYGHVAATAEAEKKGIEAAGGSADIYQVEETLSPEVVKALGGAPKPDYPIATQDTLTEYDAFLFGIPTRFGNFPAQWKAFWDRTGGLWAKGALHGKVAGCFVSTGTGGGNEATIMNSLSTLAHHGIIFVPLGYKNVFAELTNMDEVHGGSPWGAGTIAGSDGSRSPSALELQVHEIQGKTFYETVAKF

SEQ ID NO: 21177 - protein, 879 aa, Saccharomyces cerevisiae
MEMNMDMDMDMELASIVSSLSALSHSNNNGGQAAAAGIVNGGAAGSQQIGGFRRSSFTTANEVDSEILLLHGSSESSPIFKKTALSVGTAPPFSTNSKKFFGNGGNYYQYRSTDTASLSSASYNNYHTHHTAANLGKNNKVNHLLGQYSASIAGPVYYNGNDNNNSGGEGFFEKFGKSLIDGTRELESQDRPDAVNTQSQFISKSVSNASLDTQNTFEQNVESDKNFNKLNRNTTNSGSLYHSSSNSGSSASLESENAHYPKRNIWNVANTPVFRPSNNPAAVGATNVALPNQQDGPANNNFPPYMNGFPPNQFHQGPHYQNFPNYLIGSPSNFISQMISVQIPANEDTEDSNGKKKKKANRPSSVSSPSSPPNNSPFPFAYPNPMMFMPPPPLSAPQQQQQQQQQQQQEDQQQQQQQENPYIYYPTPNPIPVKMPKDEKTFKKRNNKNHPANNSNNANKQANPYLENSIPTKNTSKKNASSKSNESTANNHKSHSHSHPHSQSLQQQQQTYHRSPLLEQLRNSSSDKNSNSNMSLKDIFGHSLEFCKDQHGSRFIQRELATSPASEKEVIFNEIRDDAIELSNDVFGNYVIQKFFEFGSKIQKNTLVDQFKGNMKQLSLQMYACRVIQKALEYIDSNQRIELVLELSDSVLQMIKDQNGNHVIQKAIETIPIEKLPFILSSLTGHIYHLSTHSYGCRVIQRLLEFGSSEDQESILNELKDFIPYLIQDQYGNYVIQYVLQQDQFTNKEMVDIKQEIIETVANNVVEYSKHKFASNVVEKSILYGSKNQKDLIISKILPRDKNHALNLEDDSPMILMIKDQFANYVIQKLVNVSEGEGKKLIVIAIRAYLDKLNKSNSLGNRHLASVEKLAALVENAEV

SEQ ID NO: 21178 - protein, 434 aa, Saccharomyces cerevisiae
MLLKNLHSLLQLPIFSNGADKGIEPNCPINIPLSCSNKTDIDNSCCFEYPGGIFLQTQFWNYFPSKNDLNETELVKELGPLDSFTIHGLWPDNCHGGYQQFCNRSLQIDDVYYLLHDKKFNNNDTSLQISGEKLLEYLDLYWKSNNGNHESLWIHEFNKHGTCISTIRPECYTEWGANSVDRKRAVYDYFRITYNLFKKLDTFSTLEKNNIVPSVDNSYSLEQIEAALSKEFEGKKVFIGCDRHNSLNEVWYYNHLKGSLLSEMFVPMDSLAIRTNCKKDGIKFFPKGYVPTFRRRPNKGARYRGVVRLSNINNGDQMQGFLIKNGHWMSQGTPANYELIKSPYGNYYLRTNQGFCDIISSSSNELVCKFRNIKDAGQFDFDPTKGGDGYIGYSGNYNWGGDTYPRRRNQSPIFSVDDEQNSKKYKFKLKFIKN

SEQ ID NO: 21179 - protein, 650 aa, Saccharomyces cerevisiae
MFTFLKIILWLFSLALASAININDITFSNLEITPLTANKQPDQGWTATFDFSIADASSIREGDEFTLSMPHVYRIKLLNSSQTATISLADGTEAFKCYVSQQAAYLYENTTFTCTAQNDLSSYNTIDGSITFSLNFSDGGSSYEYELENAKFFKSGPMLVKLGNQMSDVVNFDPAAFTENVFHSGRSTGYGSFESYHLGMYCPNGYFLGGTEKIDYDSSNNNVDLDCSSVQVYSSNDFNDWWFPQSYNDTNADVTCFGSNLWITLDEKLYDGEMLWVNALQSLPANVNTIDHALEFQYTCLDTIANTTYATQFSTTREFIVYQGRNLGTASAKSSFISTTTTDLTSINTSAYSTGSISTVETGNRTTSEVISHVVTTSTKLSPTATTSLTIAQTSIYSTDSNITVGTDIHTTSEVISDVETISRETASTVVAAPTSTTGWTGAMNTYISQFTSSSFATINSTPIISSSAVFETSDASIVNVHTENITNTAAVPSEEPTFVNATRNSLNSFCSSKQPSSPSSYTSSPLVSSLSVSKTLLSTSFTPSVPTSNTYIKTKNTGYFEHTALTTSSVGLNSFSETAVSSQGTKIDTFLVSSLIAYPSSASGSQLSGIQQNFTSTSLMISTYEGKASIFFSAELGSIIFLLLSYLLF

SEQ ID NO: 21180 - protein, 329 aa, Saccharomyces cerevisiae
MVSSFSVPMPVKRIFDTFPLQTYAAQTDKDEAVALEIQRRSYTFTERGGGSSELTVEGTYKLGVYNVFLEANTGAALATDPWCLFVQLALCQKNGLVLPTHSQEQTPSHTCNHEMLVLSRLSNPDEALPILVEGYKKRIIRSTVAISEIMRSRILDDAEQLMYYTLLDTVLYDCWITQIIFCASDAQFMELYSCQKLSGSIVTPLDVENSLLQKLSAKSLKISLTKRNKFQFRHREIVKSMQGVYHNHHNSVNQEQVLNVLFENSKQVLLGLKDMLKSDGQPTYLHLKIASYILCITNVKEPIKLKTFVENECKELVQFAQDTLKNFVQ

SEQ ID NO: 21181 - protein, 327 aa, Saccharomyces cerevisiae
MVKGSVHLWGKDGKASLISVDSIALVWFIKLCTSEEAKSMVAGLQIVFSNNTDLSSDGKLPVLILDNGTKVSGYVNIVQFLHKNICTSKYEKGTDYEEDLAIVRKKDRLLEYSLLNYVDVEISRLTDYQLFLNTKNYNEYTKKLFSKLLYFPMWYNTPLQLRSQARENCEEIIGSLTLEDDEEFVESKAMESASQLAQSKTFKIAHKNKIKGKQELQQVKYNLQFDNRLQSCVSNWLAARKKLDDSVILSSDLLFLANLYVQLGLPDGNRIRSKLEQTFGSELLNSMSNKIDDFVHRPSNNLEQRDPQFREQGNVVMSLYNLACKYI

SEQ ID NO: 21182 - protein, 484 aa, Saccharomyces cerevisiae
MTSSSGVDNEISLDSPMPIFNESSTLKPIRVAGVVTTGTDHIDPSVLQAYLDDTIMKSITLGQLVKNADVLNKRLCQHHIALNAKQSFHFQGNTYISDEKETHDVVPLMEVVSQLDILPPKTFTAKTGTNFGNDNDAEAYLQFEKLIDKKYLKLPTRVNLEILRGTKIHSSFLFNSYSSLSPQSILNLKVFSQFYNWNTNKGLDIGQRGARLSLRYEPLFLHKLLHNPHSNESPTLFHEWFLETCWRSTKICSQGTSAPYMYSGTMLSQAGDQLRTILGHTFVLDKRDHIMCPTKGSMLKWSNELSPGKHLKTQLELNSVKSWMNDDFITFSTTIKTGYLKNLSSQQSLPVHICDKFQSGGPSDIRGFQTFGLGPRDLYDAVGGDAFVSYGLSVFSRLPWKKVEKSNFRLHWFFNGGKLVNHDNTSLGNCIGQLSKEHSTSTGIGLVLRHPMARFELNFTLPITAHENDLIRKGFQFGLGLAFL

SEQ ID NO: 21183 - protein, 389 aa, Saccharomyces cerevisiae
MRFSNFLTVSALLTGALGAPAVRHKHEKRDVVTATVHAQVTVVVSGNSGETIVPVNENAVVATTSSTAVASQATTSTLEPTTSANVVTSQQQTSTLQSSEAASTVGSSTSSSPSSSSSTSSSASSSASSSISASGAKGITYSPYNDDGSCKSTAQVASDLEQLTGFDNIRLYGVDCSQVENVLQAKTSSQKLFLGIYYVDKIQDAVDTIKSAVESYGSWDDITTVSVGNELVNGGSATTTQVGEYVSTAKSALTSAGYTGSVVSVDTFIAVINNPDLCNYSDYMAVNAHAYFDENTAAQDAGPWVLEQIERVYTACGGKKDVVITETGWPSKGDTYGEAVPSKANQEAAISSIKSSCGSSAYLFTAFNDLWKDDGQYGVEKYWGILSSD

SEQ ID NO: 21184 - protein, 542 aa, Saccharomyces cerevisiae
MISPISFLSSLLCLTYLTSALPILPKREVVTRVHTASTTNVVTDFYSTTTEVVIAPTVEFLISDSVTFTTTLIPQGVNPTAEPTTTITKVLLKKAEMSTSSQPTSTLQPSTIPQSTSSFQAESTLQAVSTQQTAMSVSAGTSEDVQQLATTSTSISSSPSPTTTSTSTQNIVSGVGEANVEGNTQSQHHSYQAAATSTLNQQTSTSIASQESTESTNTPTSSSTSSSTSSSTSSSTSSSTSSSTSSSTSSSTSSSTSSTQETAATTSEGSSSSSAAITSSPKAIAYSPYNDDGSCKSADAVSSDLTLIKSKGISKIRVYGTDCNSFETVQPAAVKLGIKINQGLYITSSGVDSIDDSVTTLIQYGQTNGWDVFDFITVGNEAINNGWCSVSDLISKISSVKSKLSEAGYSGQITTSEPPVSFENNPDLCKKSDIDFVGINPHAYFDTSASAETAGTFVKGQVELIQGVCGTSNVFVTETGYPSSGIQNGGNIPSTANQITAVQNILNEMDLDVTILSTYNDYWKAPGDYGIEQSFGVIEYFP

SEQ ID NO: 21185 - protein, 386 aa, Saccharomyces cerevisiae
MRLSNLIASASLLSAATLAAPANHEHKDKRAVVTTTVQKQTTIIVNGAASTPVAALEENAVVNSAPAAATSTTSSAASVATAAASSSENNSQVSAAASPASSSAATSTQSSSSSQASSSSSSGEDVSSFASGVRGITYTPYESSGACKSASEVASDLAQLTDFPVIRLYGTDCNQVENVFKAKASNQKVFLGIYYVDQIQDGVNTIKSAVESYGSWDDVTTVSIGNELVNGNQATPSQVGQYIDSGRSALKAAGYTGPVVSVDTFIAVINNPELCDYSDYMAVNAHAYFDKNTVAQDSGKWLLEQIQRVWTACDGKKNVVITESGWPSKGETYGVAVPSKENQKDAVSAITSSCGADTFLFTAFNDYWKADGAYGVEKYWGILSNE

SEQ ID NO: 21186 - protein, 338 aa, Saccharomyces cerevisiae
MKLSTVLLSAGLASTTLAQFSNSTSASSTDVTSSSSISTSSGSVTITSSEAPESDNGTSTAAPTETSTEAPTTAIPTNGTSTEAPTTAIPTNGTSTEAPTDTTTEAPTTALPTNGTSTEAPTDTTTEAPTTGLPTNGTTSAFPPTTSLPPSNTTTTPPYNPSTDYTTDYTVVTEYTTYCPEPTTFTTNGKTYTVTEPTTLTITDCPCTIEKPTTTSTTEYTVVTEYTTYCPEPTTFTTNGKTYTVTEPTTLTITDCPCTIEKSEAPESSVPVTESKGTTTKETGVTTKQTTANPSLTVSTVVPVSSSASSHSVVINSNGANVVVPGALGLAGVAMLFL

SEQ ID NO: 21187 - protein, 128 aa, Saccharomyces cerevisiae
MATTDIISLVKNNLLYFQMWTEVEILQDDLSWKGNSLRLLRGRPPHKLSNDVDTEHENSLSSPRPLEFILPINMSQYKENFLTLECLSQTFTHLCSPSTERILLAIINDDGTIVYYFVYKGVRKPKRN

SEQ ID NO: 21188 - protein, 377 aa, Saccharomyces cerevisiae
MSKGRVNQKRYKYPLPIHPVDDLPELILHNPLSWLYWAYRYYKSTNALNDKVHVDFIGDTTLHITVQDDKQMLYLWNNGFFGTGQFSRSEPTWKARTEARLGLNDTPLHNRGGTKSNTETEMTLEKVTQQRRLQRLEFKKERAKLERELLELRKKGGHIDEENILLEKQRESLRKFKLKQTEDVGIVAQQQDISESNLRDEDNNLLDENGDLLPLESLELMPVEAMFLTFALPVLDISPACLAGKLFQFDAKYKDIHSFVRSYVIYHHYRSHGWCVRSGIKFGCDYLLYKRGPPFQHAEFCVMGLDHDVSKDYTWYSSIARVVGGAKKTFVLCYVERLISEQEAIALWKSNNFTKLFNSFQVGEVLYKRWVPGRNRD

SEQ ID NO: 21189 - protein, 275 aa, Saccharomyces cerevisiae
MPPLVFDIDHIKLLRKWGICGVLSGTLPTAAQQNVFLSVPLRLMLEDVLWLHLNNLADVKLIRQEGDEIMEGITLERGAKLSKIVNDRLNKSFEYQRKFKKDEHIAKLKKIGRINDKTTAEELQRLDKSSNNDQLIESSLFIDIANTSMILRDIRSDSDSLSRDDISDLLFKQYRQAGKMQTYFLYKALRDQGYVLSPGGRFGGKFIAYPGDPLRFHSHLTIQDAIDYHNEPIDLISMISGARLGTTVKKLWVIGGVAEETKETHFFSIEWAGFG

SEQ ID NO: 21190 - protein, 467 aa, Saccharomyces cerevisiae
MQFAGKKTDQVTTSNPGFEEEEEEEEELQQDWSQLASLVSKNAALSLPKRGEKDYEPDGTNLQDLLLYNASKAMFDTISDSIRGTTVKSEVRGYYVPHKHQAVLLKPKGSFMQTMGRADSTGELWLDFHEFVYLAERGTILPYYRLEAGSNKSSKHETEILLSMEDLYSLFSSQQEMDQYFVFAHLKRLGFILKPSNQEAAVKTSFFPLKKQRSNLQAITWRLLSLFKIQELSLFSGFFYSKWNFFFRKYTTSPQLYQGLNRLVRSVAVPKNKKELLDAQSDREFQKVKDIPLTFKVWKPHSNFKKRDPGLPDFQVFVYNKNDDLQHFPTYKELRSMFSSLDYKFEFLSEIEDDDDWETNSYVEDIPRKEYIHKRSAKSQTEKSESSMKASFQKKTAQSSTKKKRKAYPPHIQQNRRLKTGYRSFIIAIMDNGLISFVKMSEADFGSESVWYTPNTQKKVDQRWKKH

SEQ ID NO: 21191 - protein, 476 aa, Saccharomyces cerevisiae
MKFSTAVTTLISSGAIVSALPHVDVHQEDAHQHKRAVAYKYVYETVVVDSDGHTVTPAASEVATAATSAIITTSVLAPTSSAAAADSSASIAVSSAALAKNEKISDAAASATASTSQGASSSSSSSSATSTLESSSVSSSSEEAAPTSTVVSTSSATQSSASSATKSSTSSTSPSTSTSTSTSSTSSSSSSSSSSSSSSSGSGSIYGDLADFSGPSEKFQDGTIPCDKFPSGQGVISIDWIGEGGWSGVENTDTSTGGSCKEGSYCSYSCQPGMSKTQWPSDQPSDGRSVGGLLCKNGYLYRSNTDADYLCEWGVEAAYVVSKLSKGVAICRTDYPGTENMVIPTYVEGGSSLPLTVVDQDTYFTWEGKKTSAQYYVNNAGVSVEDGCIWGTSGSGIGNWAPLNFGAGSTGGVTYLSLIPNPNNSDALNYNVKIVAADDSSNVIGECVYENGEFSGGADGCTVSVTSGKAHFVLYN

SEQ ID NO: 21192 - protein, 154 aa, Saccharomyces cerevisiae
MVQAVAVLKGDAGVSGVVKFEQASESEPTTVSYEIAGNSPNAERGFHIHEFGDATNGCVSAGPHFNPFKKTHGAPTDEVRHVGDMGNVKTDENGVAKGSFKDSLIKLIGPTSVVGRSVVIHAGQDDLGKGDTEESLKTGNAGPRPACGVIGLTN

SEQ ID NO: 21193 - protein, 148 aa, Saccharomyces cerevisiae
MLSNAKLLLSLAMASTALGLVSNSSSSVIVVPSSDATIAGNDTATPAPEPSSAAPIFYNSTATATQYEVVSEFTTYCPEPTTFVTNGATFTVTAPTTLTITNCPCTIEKPTSETSVSSTHDVETNSNAANARAIPGALGLAGAVMMLL

SEQ ID NO: 21194 - protein, 223 aa, Saccharomyces cerevisiae
MKKQILIVAAQSILCSTVFGERSNVGLSTEELGGDSILYFNEDPIVIEIDKKAIDKKTLEQLASTRDVVLTDLPDTLEFIDFNEYAKMKSKSDMLLEYINEYEFDDFERSSEGGLEEEEEEDLIYDFNAQAEDLGKLGSNIYEVVEEKNIVNTYDGNLINASTTESTTTIRPFVTSHSYVASSTPYSNISSLNEDYDNASNFLTPTTVALAVLLTILLFIQAY

SEQ ID NO: 21195 - protein, 445 aa, Saccharomyces cerevisiae
MVSFRGLTTLTLLFTKLVNCNPVSTKNRDSIQFIYKEKDSIYSAINNQAINEKIHGVNLGGWLVLEPYITPSLFETFRTNPYNDDGIPVDEYHFCEKLGYEKAKERLYSHWSTFYKEEDFAKIASQGFNLVRIPIGYWAFTTLSHDPYVTAEQEYFLDRAIDWARKYGLKVWIDLHGAAGSQNGFDNSGLRDSYKFLEDENLSATMKALTYILSKYSTDVYLDTVIGIELLNEPLGPVIDMERLKNLLLKPAYDYLRNKINSNQIIVIHDAFQPYHYWDGFLNDEKNEYGVIIDHHHYQVFSQVELTRKMNERIKIACQWGKDAVSEKHWSVAGEFSAALTDCTKWLNGVGLGARYDGSWTKDNEKSHYINTCANNENIALWPEERKQNTRKFIEAQLDAFEMTGGWIMWCYKTENSIEWDVEKLIQLNIFPQPINDRKYPNQCH

SEQ ID NO: 21196 - protein, 210 aa, Saccharomyces cerevisiae
MLQSVVFFALLTFASSVSAIYSNNTVSTTTTLAPSYSLVPQETTISYADDTTTFFVTSTVYSTSWFTSTSATITNAASSSLSTSSASGSVTPESTHEITSTSTITSTLLLTLHDSTTLSPSSTAASVSDEDSNNKDAKVKSFEQASTSNGCVPITKFVTVTNEPVTQYVTVTPNTTTQYVTVTGAPSVTTTSPGNVQWYNTTSITNSTSW

SEQ ID NO: 21197 - protein, 420 aa, Saccharomyces cerevisiae
MKLSATTLTAASLIGYSTIVSALPYAADIDTGCTTTAHGSHQHKRAVAVTYVYETVTVDKNGQTVTPTSTEASSTVASTTTLISESSVTKSSSKVASSSESTEQIATTSSSAQTTLTSSETSTSESSVPISTSGSASTSSAASSATGSIYGDLADFSGPYEKFEDGTIPCGQFPSGQGVIPISWLDEGGWSGVENTDTSTGGSCKEGSYCSYACQPGMSKTQWPSDQPSDGRSIGGLLCKDGYLYRSNTDTDYLCEWGVDAAYVVSELSNDVAICRTDYPGTENMVIPTYVQAGDSLPLTVVDQDTYYTWQGLKTSAQYYVNNAGISVEDACVWGSSSSGVGNWAPLNFGAGSSDGVAYLSLIPNPNNGNALNFNVKIVAADDSSTVNGECIYENGSFSGGSDGCTVSVTAGKAKFVLYN

SEQ ID NO: 21198 - protein, 381 aa, Saccharomyces cerevisiae
MSFRDVLERGDEFLEAYPRRSPLWRFLSYSTSLLTFGVSKLLLFTCYNVKLNGFEKLETALERSKRENRGLMTVMNHMSMVDDPLVWATLPYKLFTSLDNIRWSLGAHNICFQNKFLANFFSLGQVLSTERFGVGPFQGSIDASIRLLSPDDTLDLEWTPHSEVSSSLKKAYSPPIIRSKPSWVHVYPEGFVLQLYPPFENSMRYFKWGITRMILEATKPPIVVPIFATGFEKIASEAVTDSMFRQILPRNFGSEINVTIGDPLNDDLIDRYRKEWTHLVEKYYDPKNPNDLSDELKYGKEAQDLRSRLAAELRAHVAEIRNEVRKLPREDPRFKSPSWWKRFNTTEGKSDPDVKVIGENWAIRRMQKFLPPEGKPKGKDD

SEQ ID NO: 21199 - protein, 572 aa, Saccharomyces cerevisiae
MVIILLGLCTLGFPRTAFCPSIMTNSTVSINTPPPYLTLACNEKLPTVMSIAGSDSSGGAGVEADIKTITAHRCYAMTCVTTLTAQTPVKVYGAQNIPKKMVSQILDANLQDMKCNVIKTGMLTVDAIEVLHEKLLQLGENRPKLVIDPVLCAASDSSPTGKDVVSLIIEKISPFADILTPNISDCFMLLGENREVSKLQDVLEIAKDLSRITNCSNILVKGGHIPCDDGKEKHITDVLYLGAEQKFITFKGQFVNTTRTHGAGCTLASAIASNLARGYSLSQSVYGGIEYVQNAIAIGCDVTKKAVKVGPINHVYAVEIPLEKMLTDECFTASDAVPKKPIEGSLDKIPGGSFFNYLINHPKVKPHWDAYVNHEFVKRVADGTLERKKFQFFIEQDYLYLIDYVRVCCVTGSKSPTLEDLEKDLVIADCARNELNEHERRLREEFGVKDPDYLQKIKRGPALRAYCRYLIDISRRGNWQEIVVALNPCLMGYVYAVDKVKDKITAAEGSIYSEWCDTCASSFCYQAVLEGERLMNHILETYPPDQLDSLVTIFARGCELETNFWTAAMEYE

SEQ ID NO: 21200 - protein, 210 aa, Saccharomyces cerevisiae
MSVSKIAFVLSAIASLAVADTSAAETAELQAIIGDINSHLSDYLGLETGNSGFQIPSDVLSVYQQVMTYTDDAYTTLFSELDFDAITKTIVKLPWYTTRLSSEIAAALASVSPASSEAASSSEAASSSKAASSSEATSSAAPSSSAAPSSSAAPSSSAESSSKAVSSSVAPTTSSVSTSTVETASNAGQRVNAGAASFGAVVAGAAALLL

SEQ ID NO: 21201 - protein, 254 aa, Saccharomyces cerevisiae
MAYTKIALFAAIAALASAQTQDQINELNVILNDVKSHLQEYISLASDSSSGFSLSSMPAGVLDIGMALASATDDSYTTLYSEVDFAGVSKMLTMVPWYSSRLEPALKSLNGDASSSAAPSSSAAPTSSAAPSSSAAPTSSAASSSSEAKSSSAAPSSSEAKSSSAAPSSSEAKSSSAAPSSSEAKSSSAAPSSTEAKITSAAPSSTGAKTSAISQITDGQIQATKAVSEQTENGAAKAFVGMGAGVVAAAAMLL

SEQ ID NO: 21202 - protein, 251 aa, Saccharomyces cerevisiae
MAYIKIALLAAIAALASAQTQEEIDELNVILNDVKSNLQEYISLAEDSSSGFSLSSLPSGVLDIGLALASATDDSYTTLYSEVDFAAVSKMLTMVPWYSSRLLPELESLLGTSTTAASSTEASSAATSSAVASSSETTSSAVASSSEATSSAVASSSEASSSAATSSAVASSSEATSSTVASSTKAASSTKASSSAVSSAVASSTKASAISQISDGQVQATSTVSEQTENGAAKAVIGMGAGVMAAAAMLL

SEQ ID NO: 21203 - protein, 269 aa, Saccharomyces cerevisiae
MSFTKIAALLAVAAASTQLVSAEVGQYEIVEFDAILADVKANLEQYMSLAMNNPDFTLPSGVLDVYQHMTTATDDSYTSYFTEMDFAQITTAMVQVPWYSSRLEPEIIAALQSAGISITSLGQTVSESGSESATASSDASSASESSSAASSSASESSSAASSSASESSSAASSSASESSSAASSSASEAAKSSSSAKSSGSSAASSAASSASSKASSAASSSAKASSSAEKSTNSSSSATSKNAGAAMDMGFFSAGVGAAIAGAAAMLL

SEQ ID NO: 21204 - protein, 487 aa, Saccharomyces cerevisiae
MAYSKITLLAALAAIAYAQTQAQINELNVVLDDVKTNIADYITLSYTPNSGFSLDQMPAGIMDIAAQLVANPSDDSYTTLYSEVDFSAVEHMLTMVPWYSSRLLPELEAMDASLTTSSSAATSSSEVASSSIASSTSSSVAPSSSEVVSSSVAPSSSEVVSSSVAPSSSEVVSSSVASSSSEVASSSVAPSSSEVVSSSVASSSSEVASSSVAPSSSEVVSSSVAPSSSEVVSSSVASSSSEVASSSVAPSSSEVVSSSVASSTSEATSSSAVTSSSAVSSSTESVSSSSVSSSSAVSSSEAVSSSPVSSVVSSSAGPASSSVAPYNSTIASSSSTAQTSISTIAPYNSTTTTTPASSASSVIISTRNGTTVTETDNTLVTKETTVCDYSSTSAVPASTTGYNNSTKVSTATICSTCKEGTSTATDFSTLKTTVTVCDSACQAKKSATVVSVQSKTTGIVEQTENGAAKAVIGMGAGALAAVAAMLL

SEQ ID NO: 21205 - protein, 183 aa, Saccharomyces cerevisiae
MSQSNPILRGLAITTAIAALSATGYAIYFDYQRRNSPQFRKVLRQRAKEQAKMEEQAKTHAKEVKLQKVTEFLSMELAKDPIPSDPSEREATFTTNVENGERLSMQQGKELEAASKFYKALTVYPQPADLLGIYQRSIPEAIYEYIILMIAILPPANVASFVKGVVGSKAESDAVAEANDIDD

SEQ ID NO: 21206 - protein, 152 aa, Saccharomyces cerevisiae [sequence omitted]

SEQ ID NO: 21207 - protein, 387 aa, Saccharomyces cerevisiae
MSAPTPLAEASQIPTIPALSPLTAKQSKGNFFSSNPISSFVVDTYKQLHSHRQSLELVNPGTVENLNKEVSRDVFLSQYFFTGLRADLNKAFSMNPAFQTSHTFSIGSQALPKYAFSALFANDNLFAQGNIDNDLSVSGRLNYGWDKKNISKVNLQISDGQPTMCQLEQDYQASDFSVNVKTLNPSFSEKGEFTGVAVASFLQSVTPQLALGLETLYSRTDGSAPGDAGVSYLTRYVSKKQDWIFSGQLQANGALIASLWRKVAQNVEAGIETTLQAGMVPITDPLMGTPIGIQPTVEGSTTIGAKYEYRQSVYRGTLDSNGKVACFLERKVLPTLSVLFCGEIDHFKNDTKIGCGLQFETAGNQELLMLQQGLDADGNPLQALPQL

SEQ ID NO: 21208 - protein, 50 aa, Saccharomyces cerevisiae
MFGLPQQEVSEEEKRAHQEQTEKTLKQAAYVAAFLWVSPMIWHLVKKQWK

SEQ ID NO: 21209 - protein, 61 aa, Saccharomyces cerevisiae
MDGMFAMPGAAAGAASPQQPKSRFQAFKESPLYTIALNGAFFVAGVAFIQSPLMDMLAPQL

SEQ ID NO: 21210 - protein, 617 aa, Saccharomyces cerevisiae
MKSFITRNKTAILATVAATGTAIGAYYYYNQLQQQQQRGKKNTINKDEKKDTKDSQKETEGAKKSTAPSNPPIYPVSSNGEPDFSNKANFTAEEKDKYALALKDKGNQFFRNKKYDDAIKYYNWALELKEDPVFYSNLSACYVSVGDLKKVVEMSTKALELKPDYSKVLLRRASANEGLGKFADAMFDLSVLSLNGDFNDASIEPMLERNLNKQAMSKLKEKFGDIDTATATPTELSTQPAKERKDKQENLPSVTSMASFFGIFKPELTFANYDESNEADKELMNGLSNLYKRSPESYDKADESFTKAARLFEEQLDKNNEDEKLKEKLAISLEHTGIFKFLKNDPLGAHEDIKKAIELFPRVNSYIYMALIMADRNDSTEYYNYFDKALKLDSNNSSVYYHRGQMNFILQNYDQAGKDFDKAKELDPENIFPYIQLACLAYRENKFDDCETLFSEAKRKFPEAPEVPNFFAEILTDKNDFDKALKQYDLAIELENKLDGIYVGIAPLVGKATLLTRNPTVENFIEATNLLEKASKLDPRSEQAKIGLAQMKLQQEDIDEAITLFEESADLARTMEEKLQAITFAEAAKVQQRIRSDPVLAKKIQETLAKLREQGLM

SEQ ID NO: 21211 - protein, 617 aa, Saccharomyces cerevisiae; identical to SEQ ID NO: 21210

SEQ ID NO: 21212 - protein, 639 aa, Saccharomyces cerevisiae
MAENSLLRFITKNKVAILATVSAGTAAVGAYVYYQQIKQQQQQQLKGTKDNRRQSEAFAGQNEDEADLKDDGSVVSGSNKRKKKKNKRKRNNKAKSGEGFDYPSLPNGEPDIAQLKGLSPSQRQAYAVQLKNRGNHFFTAKNFNEAIKYYQYAIELDPNEPVFYSNISACYISTGDLEKVIEFTTKALEIKPDHSKALLRRASANESLGNFTDAMFDLSVLSLNGDFDGASIEPMLERNLNKQAMKVLNENLSKDEGRGSQVLPSNTSLASFFGIFDSHLEVSSVNTSSNYDTAYALLSDALQRLYSATDEGYLVANDLLTKSTDMYHSLLSANTVDDPLRENAALALCYTGIFHFLKNNLLDAQVLLQESINLHPTPNSYIFLALTLADKENSQEFFKFFQKAVDLNPEYPPTYYHRGQMYFILQDYKNAKEDFQKAQSLNPENVYPYIQLACLLYKQGKFTESEAFFNETKLKFPTLPEVPTFFAEILTDRGDFDTAIKQYDIAKRLEEVQEKIHVGIGPLIGKATILARQSSQDPTQLDEEKFNAAIKLLTKACELDPRSEQAKIGLAQLKLQMEKIDEAIELFEDSAILARTMDEKLQATTFAEAAKIQKRLRADPIISAKMELTLARYRAKGML

SEQ ID NO: 21213 - protein, 60 aa, Saccharomyces cerevisiae
MSFLPSFILSDESKERISKILTLTHNVAHYGWIPFVLYLGWAHTSNRPNFLNLLSPLPSV

SEQ ID NO: 21214 - protein, 455 aa, Saccharomyces cerevisiae
MLQKLSMTALVGLFSSVVSLVNADCTYSGGNYYCAQTDAIIYSNVGLSATYQDVTNMDESSCACTQADFTASGSLAPFNEELSVHFRGPIELLQFGVYYPNGESNALKKRSEKQSIESCKEGEAVVSRHKHQHKRDVAVEYVQVTSTVYVDSNGQTVTADSTNTVVGPAVPSSYTKDSTVLSSSAQAVETSESQSSISSSKTTSSAAAASSSSSSSSNTNGDWSRGSYFVPGSTSNCTFMNNQGGTAGSGVWSSCFGNSISFAASDGVSGAASAQALGDVTIKSGNEFMIFSGEECSGNNGDCGYYREGIPAYHGFGGADKIFVFEFSMPSDTSGSAYNQDMPAIWLLNAKIPRTLQYGDASCSCWKTGCGEMDLFEILTAGSDKLISHIHDGQDGGTQDYFERPTDGTLKAAVIFNSSDKTIHIIEVDESFDATLSDDVVDQWLSKSGSSAALP

SEQ ID NO: 21215 - protein, 102 aa, Saccharomyces cerevisiae [sequence omitted]

SEQ ID NO: 21216 - protein, 102 aa, Saccharomyces cerevisiae [sequence omitted]

SEQ ID NO: 21217 - protein, 102 aa, Saccharomyces cerevisiae [sequence omitted]

SEQ ID NO: 21218 - protein, 102 aa, Saccharomyces cerevisiae [sequence omitted]

SEQ ID NO: 21219 - protein, 102 aa, Saccharomyces cerevisiae [sequence omitted]

SEQ ID NO: 21220 - protein, 502 aa, Saccharomyces cerevisiae
MNNNNVTEATSRAQIRPYYDPDSFNAGYSAVFKPDEGVVDPHGYTIASKLNVINSSPTTKRMANALFKSSPMKKLSNSVNDGLSLEGSNGEITGLNNFEWAELVNIQKWRKIFEQLLDMFFRKYFQLLIQQPFDVARLLIQVGEFKIFKTTVDTNKPQAPIILRDEEGDGAAREGEEDAYDEEEIDFFPIERKIAEANSTAPIMAEETDHSHHEPTDISLTIAPQSLHTIDVINALFDQEGIRGLWKANNTTFIYNFLSLSIDTWFTGLLSSFLGVPDPYFMEVINSPDISKSFILALGAGVFTSIILLPVDLIRTRLIVTSFKKKKNVKTDGKNMVTNTRSLRQLIRCWSWRKNGVSIPLDMWSLTILQSINNSFFNKLFDLVIYNQFHIEKYSQTVMYNTMKFFSKSLELFIKLPLENLLRRCQLNYLLNDQRLSFKVDSTELIVKPKKYNGIWDVIRNNSNTNRGQLWNGWKVGVISLICGYGLQMMNKVDINMEQEKF

SEQ ID NO: 21221 - protein, 304 aa, Saccharomyces cerevisiae
MVTIVFDHPAEDFPELKIAGEFTNWEGVPMKINTSSGKWEYKFDESSVTKHNDKDKVHFKFIDQNGNWFADDEYPKEVDEHSNENNVATLNNEEDGGSAGEEKDEGDKTAHNTNENGSELYYEGPETPTPSLKGNVTFPSPKTAISQDGSAFAKETTRKERKYEHAPLNEVPVERDPKEENKELSPNFSQEQTENKQDKGLDNLSEGNDNDNTRVNEDTDVTDTQESEHEINGSDTENTDMSEQEEIQKIDKPADQNAKSIVKEGDANTEDYESVLKKLLGALGRFFGSWFSWLTTKMSSSEAS

SEQ ID NO: 21222 - protein, 175 aa, Saccharomyces cerevisiae
MVLLHKSTHIFPTDFASVSRAFFNRYPNPYSPHVLSIDTISRNVDQEGNLRTTRLLKKSGKLPTWVKPFLRGITETWIIEVSVVNPANSTMKTYTRNLDHTGIMKVEEYTTYQFDSATSSTIADSRVKFSSGFNMGIKSKVEDWSRTKFDENVKKSRMGMAFVIQKLEEARNPQF

SEQ ID NO: 21223 - protein, 230 aa, Saccharomyces cerevisiae
MKLFQNSYDFNYPWDQVTAANWKKYPNEISTHVIAVDVLRRELKDQGKVLVTERLITVKQGVPKWIMMMLGGTNMSHVREVSVVDLNKKSLTMRSCNLTMCNLLKVYETVTYSPHPDDSANKTLFQQEAQITAYGSIRKLCNKMEDWSVQRFCENAKKGKMGFDAVLQVFSENWEKHVDDLSNQLVSKVNETMEDVKISAGTLLKGTERSGRTILQQNIDLFRDAYNHEN

SEQ ID NO: 21224 - protein, 179 aa, Saccharomyces cerevisiae
MKSFQKSYEFDYPWEKVTTANWMKYPNKISTHVIAVDVLRRELKEHGDVLLTERLITIRQNTPHWMSILVGNTNLAYVREVSTVDRRDRSLTMRSCNMTFPHILKCYETVRYVPHPKNPSNVTLFKQDAKFLSGVPTKTFSEKVENWGVKRFSDNAVKGKVGFDSILAMFNDIWKNANE

SEQ ID NO: 21225 - protein, 362 aa, Saccharomyces cerevisiae
MKLSALLALSASTAVLAAPAVHHSDNHHHNDKRAVVTVTQYVNADGTVVIPAANTATSAAADGKVESVAAATTTLSSTAAAATTSAAASSSSSSSSSSSSVGSGDFEDGTISCSDFPSGQGAVSLDWLGLGGWASIMDMNGNTATSCQDGYYCSYACSPGYAKTQWPSEQPSDGRSVGGLYCKNGKLYRSNTDTNSLCVEGQGSAQAVNKVSGSIAICGTDYPGSENMVVPTVVGAGSSQPINVIKEDSYYQWQGKKTSAQYYVNNAGVSVEDGCIWGTEGSGVGNWAPVVLGAGYTDGITYLSIIPNPNNKEAPNFNIKIVATDGSTVNGACSYENGVYSGSGSDGCTVSVTSGSANFVFY

SEQ ID NO: 21226 - protein, 362 aa, Saccharomyces cerevisiae; identical to SEQ ID NO: 21225

SEQ ID NO: 21227 - protein, 362 aa, Saccharomyces cerevisiae
MKLSALLALSASTAVLAAPAVHHSDNHHHNDKRAVVTVTQYVNADGAVVIPAANTATSAAADGKVESVAAATTTLSSTAAAATTSAAASSSSSSSSSSSSVGSGDFEDGTISCSDFPSGQGAVSLDWLGLGGWASIMDMNGNTATSCQDGYYCSYACSPGYAKTQWPSEQPSDGRSVGGLYCKNGKLYRSNTDTNSLCVEGQGSAQAVNKVSGSIAICGTDYPGSENMVVPTVVGAGSSQPINVIKEDSYYQWQGKKTSAQYYVNNAGVSVEDGCIWGTEGSGVGNWAPVVLGAGYTDGITYLSIIPNPNNKEAPNFNIKIVATDGSTVNGACSYENGVYSGSGSDGCTVSVTSGSANFVFY

SEQ ID NO: 21228 - protein, 365 aa, Saccharomyces cerevisiae
MKLSALLALSASTAVLAAPAVHHSDNHHHNDKRAVVTVTQYVNADGAVVIPAATTATSAAADGKVESVAAATTTLSSTAAAATTSAAASSSSSSSSSSSSSSSVGSGDFEDGTISCSDFPSGQGAVSLDWLGLGGWASIMDMNGNTATSCQDGYYCSYACSPGYAKTQWPSEQPSDGRSVGGLYCKNGKLYRSNTDTNSLCVEGQGSAQAVNKVSGSIAICGTDYPGSENMVVPTVVGAGSSQPINVIKEDSYYQWQGKKTSAQYYVNNAGVSVEDGCIWGTEGSGVGNWAPVVLGAGYTDGITYLSIIPNPNNKEAPNFNIKIVATDGSTVNGACSYENGVYSGSGSDGCTVSVTSGSANFVFY

SEQ ID NO: 21229 - protein, 283 aa, Saccharomyces cerevisiae
MSPPVYSDISRNINDLLNKDFYHATPAAFDVQTTTANGIKFSLKAKQPVKDGPLSTNVEAKLNDKQTGLGLTQGWSNTNNLQTKLEFANLTPGLKNELITSLTPGVAKSAVLNTTFTQPFFTARGAFDLCLKSPTFVGDLTMAHEGIVGGAEFGYDISAGSISRYAMALSYFAKDYSLGATLNNEQITTVDFFQNVNAFLQVGAKATMNCKLPNSNVNIEFATRYLPDASSQVKAKVSDSGIVTLAYKQLLRPGVTLGVGSSFDALKLSEPVHKLGWSLSFDA

SEQ ID NO: 21230 - protein, 281 aa, Saccharomyces cerevisiae
MALRFFNDISRDVNGLFNRDFFHTNPLSLNISTTTENGVNFTLKAKQGVTEGPIQTSVEGRFYDRKEGVSLSQSWSNQNRLNTRIEFSKIAPGWKGDVNAFLTPQSIKNAKFNLSYAQKSFAARTSIDILQPKDFVGSVTLGHRGFVGGTDIAYDTAAGLCARYAMSIGYLAREYSFILSTNNRQCATASFFQNVNRYLQVGTKATLQSKTSSNMNIEFVTRYVPDSISQVKAKIADSGLTTLSYKRNLNKDISLGVGMSFNALQLTEPVHKFGWSLSFSP

SEQ ID NO: 21231 - protein, 459 aa, Saccharomyces cerevisiae
MSGSDRGDRLYDVLGVTRDATVQEIKTAYRKLALKHHPDKYVDQDSKEVNEIKFKEITAAYEILSDPEKKSHYDLYGDDNGAASSGGANGFGDEDFMNFFNNFFNNGSHDGNNFPGEYDAYEEGNSTSSKDIDIDISLTLKDLYMGKKLKFDLKRQVICIKCHGSGWKPKRKIHVTHDVECESCAGKGSKERLKRFGPGLVASQWVVCEKCNGKGKYTKRPKNPKNFCPDCAGLGLLSKKEIITVNVAPGHHFNDVITVKGMADEEIDKTTCGDLKFHLTEKQENLEQKQIFLKNFDDGAGEDLYTSITISLSEALTGFEKFLTKTFDDRLLTLSVKPGRVVRPGDTIKIANEGWPILDNPHGRCGDLYVFVHIEFPPDNWFNEKSELLAIKTNLPSSSSCASHATVNTEDDSNLTNNETISNFRIIHTDDLPEGIRPFKPEAQDSAHQKARSSYCCIQ

SEQ ID NO: 21232 - protein, 79 aa, Saccharomyces cerevisiae
MKMNPCTVILCKSLFFFCLFQVDCYCNRKNIQNQSSRIATKIKRSYWFRWQKHIILANIHKIIKAYQRSIIKLPVTKGL

SEQ ID NO: 21233 - protein, 54 aa, Saccharomyces cerevisiae
MLLCFHMCQRIMWLPFDLMKWRRFHCGAVLVGTLSLRNRSPKILSLYFISDRTG

SEQ ID NO: 21234 - protein, 136 aa, Saccharomyces cerevisiae
MQFSTVASIAAIAAVASAASNITTATVTEESTTLVTITSCEDHVCSETVSPALVSTATVTVNDVITQYTTWCPLPTTEAPKNTTSPAPTEKPTEKPTEKPTQQGSSTQTVTSYTGAAVKALPAAGALLAGAAALLL

SEQ ID NO: 21235 - protein, 114 aa, Saccharomyces cerevisiae
MSNPFQNIGKNLLYISAAGIASIYVVKTIVKARRDAKFIPKARGNNGEVNEKNYYDNLAQVKPGFPIPKDGGDNIDCSEDHQLVRKSKYEGSGLSAVTRKRGDKLGFLDRRRNE

SEQ ID NO: 21236 - protein, 354 aa, Saccharomyces cerevisiae
MKFQVVLSALLACSSAVVASPIENLFKYRAVKASHSKNINSTLPAWNGSNSSNVTYANGTNSTTNTTTAESSQLQIIVTGGQVPITNSSLTHTNYTRLFNSSSALNITELYNVARVVNETIQDKSSAGAVVVANAKSLEAVSFFFSIIFDTEKPIVVTEDSAYAIPVANNKNATKRGVLSVTSDKLVYSGVFTPPTACSYGAGLPVAIVDDQDEVKWFFDASKPTLISSDSIIRKEYSNFTTPYGLLENGVPIVPIVYDGGYSSSLIDSLSSAVQGLVVVSSGSTNSTSSTIESTEIPVVYAQANTPLNFIDNKDVPKNAVGAGYLSPIKAQILLSIAAVNGVTSKSALESIFP

SEQ ID NO: 21237 - protein, 385 aa, Saccharomyces cerevisiae
MAWSGGKDIVDQIFDAGYWLVSKSAVLSDEIKNHVEKSIESISGKISNKETPRLQENDSNRSKVYKTLRIGLQDHWKLGLGISATSLCLYLGYRTFFKLPPNLPEAESQVVLILGDMNDPIIRNQVMDLYRRRFTVYICTENADVYKKHEEDQDFIYYIDPTCEKDFEGFFVDVPRLASILFMPRLSYHPSGVISCDSLESEIHSSIFVYYQALLSIIPHLKRKTQLIMFNPSLTADLNLVHHSTEIITSGIIDSLFKIFKEYQRLNVSTIKLGILQIGSQPSNYKFLRMAGSDIHEALHYPVYKMIMSANGYKLRQLLSWLTTLGGYNSVYYCGRFSYLVSWPFASLIFNHHTRLSLKRLRGRLAKVYSSIISFFCRSSSKSSK

SEQ ID NO: 21238 - protein, 74 aa, Saccharomyces cerevisiae
MIAQSTRLAAAVSSSAASAGVSRIAASAMASTIFKRSPGNSFNSFKEYRENAKTYGPLSASLATRRHLAHAPKL

SEQ ID NO: 21239 - protein, 447 aa, Saccharomyces cerevisiae
MVEKDTWKLITATALFTVAVTTITDYAWTSWQAQKQVIAQQKNKNKGGQTKSDTDKYHQYDEQFIRQSLKNNVEFLGEDTIEKLSNQYVVVVGAGGVGSWVVNSLVRSGCRKIRVVDFDQVSLSSLNRHSCAILNDVGTPKVECLRRHMREIAPWCEIDPINELWTLQNGERLTLGNGTPDFIVDCIDNIDTKVDLLEFAYNHGIKVISSMGASAKSDPTKLNVGDLATTEEDPLARVVRRKLKKRGILSGIPVVFSAEKPDPKKAKLLPLPDEEYERGKVDELSALKDFRVRILPVLGTMPSLFGLTITTWILSNISDKPLEPVEGKNRIKVYDGIYQSLAGQMSRVGIPSQRIPLALKDVSYLVEEVFKGKSPISGISTRLTLTKWDPSKPISLQNVVVLTKNEQKVHEDRVLKGKESLQDVYDAKVLKLVSQRFREEAYYSQFR

SEQ ID NO: 21240 - protein, 725 aa, Saccharomyces cerevisiae
MFKVFGFGAKEEIPELSQEEKTKAILKQAHDFEQALRAMDYVLDDNADEGLALLDESDAKEASDQTINALARGVIEFLEATLGFEAEEMKKASATLAKAEALSLKSRERAQKIGLKSSSLYPPGTVYAVTYTESCLLHALLMIFSESMMEAAKAILKLRKSYYMLQEILETIKAANKAKKLKITSGSEDKESTPATFITGGDAFNSVDIPYELTPEEQKDKDLLQFAEQIHSMRTKRLSGAHIGNSPAINRLRGELGLQAMEDLPEEEITDHKVLSDDIDLSQATIDEFVHSGVNLCFGILQVVISLLPPAIGAVLSVVGFRGSREEGLRLVWKATKQRNVHGCIGLLALMFYYDGPFQFTDDDFDIPAAVKDSSNSEDSEDEEMDGPTLLHPGKILEDALLQSRALFPNSALWLLNEARMLSGKGRLEEAVALMDSIDVSKIRMRQVKSLMIFDRAITLIHLHQYDRAAEDILSLLDISDWSHAFYTYFAGCCYLENWRMCEMGLMKSDKKDEYQKKAEELIFTSVNLLGKKTFKSKNLPLDRFILRKVEQFKAKKEELGVENPLDGIATSPVHEISYFYNGYNRMSEEHLELTKKMLTEYRNPAIEALDSDQELIKDLLVSLTLRRLGHIQEGCDILDEKVLPKFFSIQNGKVKYIKKTEDPWAYPTALYERALFTWKLEGMDGLPESKEWLLRAQGYADDYELSTRVGMKIKAAIDRVDHSL

SEQ ID NO: 21241 - protein, 725 aa, Saccharomyces cerevisiae
MFKVFGFGAKEEIPELSQEEKTKAILKQAHDFEQALRAMDYVLDDNADEGLALLDESDAKEASDQTINALARGVIEFLEATLGFEAEEMKKASATLAKAEALSLKSRERAQKIGLKSSSLYPPGTVYAVTYTESCLLHALLMIFSESMMEAAKAILKLRKSYYMLQEILETIKAANKAKKLKITSGSEDKESTPATFITGGDAFNSVDIPYELTPEEQKDKDLLQFAEQIHSMRTERLSGAHIGNSPAINRLRGELGLQAMEDLPEEEITDHKVLSDDIDLSQATIDEFVHSGVNLCFGILQVVISLLPPAIGAVLSVVGFRGSREEGLRLVWKATKQRNVHGCIGLLALMFYYDGPFQFTDDDFDIPAAVKDSSNSEDSEDEEMDGPTLLHPGKILEDALLQSRALFPNSALWLLNEARMLSGKGRLEEAVALMDSIDVSKIRMRQVKSLMIFDRAITLIHLHQYDRAAEDILSLLDISDWSHAFYTYFAGCCYLENWRMCEMGLMKSDKKDEYQKKAEELIFTSVNLLGKKTFKSKNLPLDRFILRKVEQFKAKKEELGVENPLDGIATSPVHEIAYFYNGYNRMSEEHLELTKKMLTEYRNPAIEALDSDQELIKDLLVSLTLRRLGHIQEGCDILDEKVLPKFFSIQNGKVKYIKKTEDPWAYPTALYERALFTWKLEGMDGLPESKEWLLRAQGYADDYELSTRVGMKIKAAIDRVDHSL

SEQ ID NO: 21242 - protein, 224 aa, Saccharomyces cerevisiae
MIFAPSFSLIKNILLVSFLISHSFAAKTLTSSSNDDTLARSAAADADMAFFMEFLNDFDTAFPQYTSYMMQNHLTLPQPVADYYYHMVDLASTADLQSDIAQSFPFTQFQTFITAFPWYTSLLNKASATTIYLPQHFITGETEATMTNSSYASQKNSVSNSVPFSTANAGQSMISMANEENSTTALISASNSSSTSRTSQSQNGAHAKSLYFPMALFGIFAVAL

SEQ ID NO: 21243 - protein, 161 aa, Saccharomyces cerevisiae
MKISQFGSLAFAPIVLLQLFIVQAQLLTDSNAQDLNTALGQKVQYTFLDTGNSNDQLLHLPSTTSSSIITGSLAAANFTGSSSSSSIPKVTSSVITSINYQSSNSTVVTQFTPLPSSSRNETKSSQTTNTISSSTSTGGVGSVKPCLYFVLMLETIAYLFS

SEQ ID NO: 21244 - protein, 236 aa, Saccharomyces cerevisiae
MLGLYLSSLFFAFFMAQVFATKYSITFTSDEYEEDETGQNEPGPLVFHLDKNSLPPALLNQMEFNPYLVLADLPEEPRAVDSQEHTDTVLASKSVIDFLLEDPLTIVEHKKFSQIESILHEIMEDSIQKKVGADEVFEEIPKPKIYAYEDILVTNMSIINNSEMPTSTATLTSTISYLSSTTSLALSTGVTSVEIFPTITPGNITTIGGYENSSSSLMPSMGILSFLFGLYLLLHP

SEQ ID NO: 21245 - protein, 302 aa, Saccharomyces cerevisiae
MIKLHEVPPEPVDPASLPHDVNAHSPEGDGNPDKRKKIFGIPYPFSRSSCRRFLWNCQKISVLPMALYFPLHAANTLITPAVSPDSAPDDVLMMVREILPSITTKLLVAGITLHVSAGVLLRIVNNWNKPRRNRHRHLKISAEQDLSQDSIGLTGGISGYLFGLYKTFRIPPQVISGYILVPVLIYHLLIMKWVPNSISTEVDFASIKQLLSSKNRWWKWLGGLVPLAILLESGVYHIGSGLCRYFGVRKMTSRKKWSTAINLLTLVGFVSLIRLMKEDSTKLGPNQFESIFKKIRLLLHVN

SEQ ID NO: 21246 - protein, 624 aa, Saccharomyces cerevisiae
MRFHRQGTAATVGVLLIVLLGFCWKLSESYGIVSTALPHKQPATKITDTPSIRWDNYHEFVRDIDFDNSTAIFNSIRAALRQSPSDIHPVGVSYFPAVIPKGTLMYHAGSKVPTTFEWLAMDHEFSYSFGLRSPSYGRKSLERRHGRFGNGTHGDHPKGPPPPPPPDEKDRGSQKMLTYRAARDLNKFLYLDGASAAKTDSGEMDTQLMLSNVIKEKLNLTDDGENERMAERLYAARICKWGKPFGLDGIIRVEVGFEVVLCDFSADNVELVSMLEMVQPNQYLGLPAPTVISKEEGWPLDENGNLVEDQLTDDQKAILEREDGWEKTFSNFNAVKSFNQLRAGTAHDNGEHRIHIDYRYLVSGINRTYIAPDPNNRRLLDEGMTWEKQLDMVDDLEKALEVGFDATQSMDWQLAFDELVLKFAPLLKSVSNILNSNGDINESIAINATALTLNFCLRFEPASNNSDEFGSGKDFAVYQYVSPYQALKTDADFLIWSSAVSVVGEIVDAIYKVNDLLIPEVYSFMTDNTTSSDLIKNVETARSTIDGLIESLGWIELNYRCERQCNWDEVCYTPSWGPSPMGMTEPGSHNEGFGTHFDESRQRLVINSKLQCININDLMVNRNH

SEQ ID NO: 21247 - protein, 161 aa, Saccharomyces cerevisiae
MCLVKTTAHLLFYSFVFGGTTFYSYVASPIAFKVLEKDQFSALQNKIFPYFFQMQAASPVILALTAPIALTTGPLSSLVVASVSGLTNLFWLLPWTHKVKEQRKNIAKKYTGSELEAKDAILRKEFGKSHGLSLLFNLSNVCGMLAYGVCLSGGLLRKIPK

SEQ ID NO: 21248 - protein, 276 aa, Saccharomyces cerevisiae
MRLQRNSIICALVFLVSFVLGDVNIVSPSSKATFSPSGGTVSVPVEWMDNGAYPSLSKISTFTFSLCTGPNNNIDCVAVLASKITPSELTQDDKVYSYTAEFASTLTGNGQYYIQVFAQVDGEGYTIHYTPRFQLTSMGGVTAYTYSATTEPTPQTSIQTTTTNNAQATTIDSRSFTVPYTKQTGTSRFAPMQMQPNTKVTATTWTRKFATSAVTYYSTFGSLPEQATTITPGWSYTISSGVNYATPASMPSDNGGWYKPSKRLSLSARKINMRKV

SEQ ID NO: 21249 - protein, 299 aa, Saccharomyces cerevisiae
  MOD_RES (71)..(71): Any amino acid
  MOD_RES (295)..(295): Any amino acid
MKLSKLSILTSALATSALAAPAVVTVTEHAHEAAVVTVQGVVYVENGQTRTTYETLAPASTATPTSTATAXVAPPVAPSSASSNSDVVLSALKNLASVWGKTTDSTTTLTSSESTSQSLAQATTTSTPAAASTTSTPAATTTTSQAAATSSASSSDSDLSDFASSVLAEHNKKRALHKDTPALSWSDTLASYAQDYADNYDCSGTLTHSGGPYGENLALGYDGPAAVDAWYNEISNYDFSNPGFSSNTGHFTQVVWKSTTQVGCGIKTCGGAWGDYVICSYDPAGNYEGEYADNXEPLA

SEQ ID NO: 21250 - protein, 165 aa, Saccharomyces cerevisiae
MRFPSIFTAVLFAASSALAAPVNTTTEDETAQIPAEAVIGYLDLEGDFDVAVLPFSNSTNNGLLFINTTIASIAAKEEGVSLDKREAEAWHWLQLKPGQPMYKREADAEAWHWLQLKPGQPMYKREADAEAWHWLQLKPGQPMYKREADAEAWHWLQLKPGQPMY

SEQ ID NO: 21251 - protein, 425 aa, Saccharomyces cerevisiae
  MOD_RES (106)..(106): Any amino acid
MISANSLLISTLCAFAIATPLSKRDSCTLTGSSLSSLSTVKKCSSIVIKDLTVPAGQTLDLTGLSSGTTVMFEGTTTFQYKEWSGPLISISGSKISVVGASGHTIXGQGAKWWDGLGDSGKVKPKFVKLALTGTSKVTGLNIKNAPHQVFSINKCSDLTISDITIDIRDGDSAGGHNTDGFDVGSSSNVLIQGCTVYNQDDCIAVNSGSTIKFMNNYCYNGHGISVGSVGGRSDNTVNGFWAENNYVINSDNGLRIKTVEGATGTVTNVNFISNKISGTKSYGIVIEGDYLNGKTTGTATGGVPISNLVMKDITGSVNSTAKRVKILVKNATNWQWSGVSIYRWFFLFWMFWNPIWIWCKLLILFKSTHMTIYTFFSFFYYSIHNRTKMQENIGILFRQFMLGFFVNSGLIITVDLYQVGIFFAI

SEQ ID NO: 21252 - protein, 120 aa, Saccharomyces cerevisiae; identical to SEQ ID NO: 21131

SEQ ID NO: 21253 - protein, 918 aa, Saccharomyces cerevisiae
  MOD_RES (266)..(266): Any amino acid
  MOD_RES (305)..(305): Any amino acid
  MOD_RES (325)..(325): Any amino acid
  MOD_RES (338)..(338): Any amino acid
  MOD_RES (358)..(358): Any amino acid
  MOD_RES (379)..(379): Any amino acid
  MOD_RES (402)..(402): Any amino acid
  MOD_RES (474)..(474): Any amino acid
  MOD_RES (514)..(514): Any amino acid
  MOD_RES (573)..(573): Any amino acid
  MOD_RES (588)..(588): Any amino acid
  MOD_RES (592)..(592): Any amino acid
  MOD_RES (597)..(597): Any amino acid
  MOD_RES (659)..(659): Any amino acid
  MOD_RES (709)..(709): Any amino acid
  MOD_RES (744)..(744): Any amino acid
MLEFPISVLLGCLVAVKAQTTFPNFESDVLNEHNKFRALHVDTAPLTWSDTLATYAQNYADQYDCSGVLTHSDGPYGENLALGYTDTGAVDAWYGEISKYNYSNPGFSESTGHFTQVVWKSTAEIGCGYKYCGTTWNNYIVCSYNPPGNYLGEFAEEVEPLISTVSSSSSSSSSSTSTTSDTVSTISSSIMPAVAQGYTTTVSSAASSSSLKSTTINPAKTATLTASSSTVITSSTESVGSSTVSSASSSSVTTSYATSSSTVVSXDATSSTTTTSSVATSSSTTSSDPASSTTTASSSTTSSDXTSSTTSSSSSTTSSDPTSSXAASSSSTTSSDPXSSSAAASSSASTENAASSSXAISSSSSMVSAPLSSTLTTSXASSRSVTSSSVNSVKFANTTVFXAQTTSSVSASLSSSVAADDIQGSTSKEATSSVSEHTSIVTSATNAAQYATRLGSSSRSSSGAVSSSAVSQSXLNSVIAVNTDVSVTSVSSAAHTTKDTATTSVTASESITSXTAQVSSSTEKKISNSAATSSSIYSNSASVSGHGVTYAAEYAITSEQSSALATSVPATNXSSIVKTTTLENSSTXTITXITKSXTTLATTANNSTRAATAVTIDPTLDPTDNSASPTDNAKHTSTYGSSSTGASLDSLRTTTSISXSSNTTQLVSTCTSESDYSDSPSFAISTATTTESNLITNTITASCSTDSNXPISAASSTDETAFTRTISTSCSTLNGASTQTSELXTSPMKTNTVVPASSSPSTTTTCLENDDTAFSSIYTEVNAATIINPGETSSLASDFATSEKPNEPTSVKSTSNEGTSSTTTTYQQTVATLYAKPSSTSLGARTTTGSNGRSTTSQQDGSAMHQPTSSIYTQLKEGTSTTAKLSAYEGAATPLSIFQCNSLAGTIAAFVVAVLFAF

SEQ ID NO: 21254 - protein, 268 aa, Saccharomyces cerevisiae; identical to SEQ ID NO: 21102

SEQ ID NO: 21255 - protein, 330 aa, Saccharomyces cerevisiae
  MOD_RES (250)..(250): Any amino acid
MKFSKVSLLAASASVALSAPVAVTVTQHVHQAATVVVQGIVRVENGQTLTTFITKGTQTASASPVATTSAPIVVANAQVDSIATSVIQESAVVAESATFEESSTETSEAFSTATATIQAVQTSASATQDDVTTTLTSSTQPTSTTTPTTTTTSPTTTVSPTTTASPTTTTASPTTATTTQSTASSTQSSSSDFSTSMVNEHNTKRALHKDTGSLTWSDTLATYAQNYADSYDCSGNLVHSGGPYGENLAXGYGTTGSVDAWYNEITSYDYSNPGFSESAGHFTQVVWKGTSEVGCGLKSCGGAWGDYIICSYKAAGNVIGEFADNVMPLA

SEQ ID NO: 21256 - protein, 361 aa, Saccharomyces cerevisiae
MISANSLLISTLCAFAIATPLSKRDSCTLTGSSLSSLSTVKKCSSIVIKDLTVPAGQTLDLTGLSSGTTVTFEGTTTFQYKEWSGPLISISGSKISVVGASGHTIDGQGAKWWDGLGDSGKVKPKFVKLALTGTSKVTGLNIKNAPHQVFSINKCSDLTISDITIDIRDGDSAGGHNTDGFDVGSSSNVLIQGCTVYNQDDCIAVNSGSTIKFMNNYCYNGHGISVGSVGGRSDNTVNGFWAENNHVINSDNGLRIKTVEGATGTVTNVNFISNKISGIKSYGIVIEGDYLNGKTTGTATGGVPISNLVMKDITGSVNSTAKRVKILVKNATNWQWSGVSITGGSSYSGCSGIPSGSGASC

SEQ ID NO: 21257 - protein, 144 aa, Saccharomyces cerevisiae
MRFPSIFTAVLFAASSALAAPVNTTTEDETAQIPAEAVIGYLDLEGDFDVAVLPFSNSTNNGLLFINTTIASIAAKEEGVSLDKREAEAWHWLQLKPGQPMYKREAEAEAWHWLQLKPGQPMYKREADAEAWHWLQLKPGQPMY

SEQ ID NO: 21258 - protein, 662 aa, Saccharomyces cerevisiae
MTKETIRVVICGDEGVGKSSLIVSLTKAEFIPTIQDVLPPISIPRDFSSSPTYSPKNTVLIDTSDSDLIALDHELKSADVIWLVYCDHESYDHVSLFWLPHFRSLGLNIPVILCKNKCDSISNVNANAMVVSENSDDDIDTKVEDEEFIPILMEFKEIDTCIKTSAKTQFDLNQAFYLCQRAITHPISPLFDAMVGELKPLAVMALKRIFLLSDLNQDSYLDDNEILGLQKKCFNKSIDVNELNFIKDLLLDISKHDQEYINRKLYVPGKGITKDGFLVLNKIYAERGRHETTWAILRTFHYTDSLCINDKILHPKLVVPDTSSVELSPKGYRFLVDIFLKFDIDNDGGLNNQELHRLFKCTPGLPKLWTSTNFPFSTVVNNKGCITLQGWLAQWSMTTFLNYSTTTAYLVYFGFQEDARLALQVTKPRKMRRRSGKLYRSNINDRKVFNCFVIGKPCCGKSSLLEAFLGRSFSEEYSPTIKPRIAVNSLELKGGKQYYLILQELGEQEYAILENKDKLKECDVICLTYDSSDPESFSYLVSLLDKFTHLQDLPLVFVASKADLDKQQQRCQIQPDELADELFVNHPLHISSRWLSSLNELFIKITEAALDPGKNTPGLPEETAAKDVDYRQTALIFGSTVGFVALCSFTLMKLFKSSKFSK

SEQ ID NO: 21259 - protein, 268 aa, Saccharomyces cerevisiae; identical to SEQ ID NO: 21102

SEQ ID NO: 21260 - protein, 878 aa, Saccharomyces cerevisiae
MLEFPISVLLGCLVAVKAQTTFPNFESDVLNEHNKFRALHVDTAPLTWSDTLATYAQNYADQYDCSGVLTHSDGPYGENLALGYTDTGAVDAWYGEISKYNYSNPGFSESTGHFTQVVWKSTAEIGCGYKYCGTTWNNYIVCSYNPPGNYLGEFAEEVEPLISTVSSSSSSSSSTSTTSDTVSTISSSIMPAVAQGYTTTVSSAASSSSLKSTTINPAKTATLTASSSTVITSSTESVGSSTVSSASSSSVTTPYATSSSTVVSNDATSSTTTTSSVATSSSTTSSDPTSSTAAASSSDPASSSAAASSSASTENAASSSSAISSSSSMVSAPLSSTLTTSTASSRSVTSSSVNSVKFANTTVFSAQTTSSVSASLSSSVAADDIQGSTSKEATSSVSEHTSIVTSATNAAQYATRLGSSSRSSSGAVSSSAVSQSVLNSVIAVNTDVSVTSVSSAAHTTKDTATTSVTASESITSETAQASSSTEKNISNSAATSSSIYSNSASVSGHGVTYAAEYAITSSALATSVPATNCSSIVKTTTLENSSTTTITAITKSTTTLATTANNSTRAATAVTIDPTLDPTDNSASPTDNAKHTSTYGSSSTGASLDSLRTTTSISVSSNTTQLVSTCTSESNYSDSPSFAISTATTTESNLITNTITASCSTDSNFPISAASSTDETAFTRTISTSCSTLNGASTQTSELTTSPMKTNTVVPASSFPSTTTTCLENDDTAFSSIYTEVNAATIINPGETSSLASDFATSEKPNEPTSVKSTSNEGTSSTTTTYQQTVATLYAKPSSTSLGARTTTGSNGRSTTSQQDGSAMHQPTSSIYTQLKEGTSTTAKLSAYEGAATPLSIFQCNSLAGTIAAFVVAVLFAF

SEQ ID NO: 21261 - protein, 299 aa, Saccharomyces cerevisiae; identical to SEQ ID NO: 21170

SEQ ID NO: 21262 - protein, 329 aa, Saccharomyces cerevisiae; identical to SEQ ID NO: 21171

SEQ ID NO: 21263 - protein, 276 aa, Saccharomyces cerevisiae; identical to SEQ ID NO: 21104

SEQ ID NO: 21264 - protein, 120 aa, Saccharomyces cerevisiae; identical to SEQ ID NO: 21131

SEQ ID NO: 21265 - protein, 268 aa, Saccharomyces cerevisiae
MLIVLFLTLFCSVVFRTAYCDVAIVAPEPNSVYDLSGTSQAVVKVKWMHTDNTPQEKDFVRYTFTLCSGTNAMIEAMATLQTLSATDLTDNEFNAIIENTVGTDGVYFIQVFAQTAIGYTIHYTNRFKLKGMIGTKAANPSMITIAPKAQTRITTGDVGATIDSKSFTVPYNLQTGVVKYAPMQLQPATKVTAKTWKRKYATSEVTYYYTLRNSVDQHTTVTPGWSYIITADSNYATPAPMPADNGGWYNPRKRLSLTARKVNALRHR

SEQ ID NO: 21266 - protein, 276 aa, Saccharomyces cerevisiae
MRLQRNSIICALVFLVSFVLGDVNIVSPSSKATFSPSGGTVSVPVEWMDNGAYPSLSKISTFTFSLCTGPNNNIDCVAVLANKITPSELTQDDKVYSYTAEFASTLTGNGQYYIQVFAQVDGQGYTIHYTPRFQLTSMGGVTAYTYSATTEPTPQTSIQTTTTNNAQATTIDSRSFTVPYTKQTGTSRFAPMQMQPNTKVTATTWTRKFATSAVTYYSTFGSLPEQATTITPGWSYTISSGVNYATPASMPSDNGGWYKPSKRLSLSARKINMRKV

SEQ ID NO: 21267 - protein, 299 aa, Saccharomyces cerevisiae
MKLSKLSILTSALATSALAAPAVVTVTEHAHEAAVVTVQGVVYVENGQTRTTYETLAPASTATPTSTATALVAPPVALSSASSNSDAVLSALKNLASVWGKTTDSTTTLTPSESTSQSLAQATTTSTPAAASTTSTPAATTTTSQAAATSSASSSDSDLSDFASSMLAEHNKKRALHKDTPALSWSDTLASYAQDYADNYDCSGTLTHSGGPYGENLALGYDGPAAVDAWYNEISNYDFSNPGFSSNTGHFTQVVWKSTTQVGCGIKTCGGAWGDYVICSYDPAGNYEGEYADNVEPLA

SEQ ID NO: 21268 - protein, 918 aa, Saccharomyces cerevisiae
MLEFPISVLLGCLVAVKAQTTFPNFESDVLNEHNKFRALHVDTAPLTWSDTLATYAQNYADQYDCSGVLTHSDGPYGENLALGYTDTGAVDAWYGEISKYNYSNPGFSESTGHFTQVVWKSTAEIGCGYKYCGTTWNNYIVCSYNPPGNYLGEFAEEVEPLISTVSSSSSSSSSSTSTTSDTVSTISSSIMPAVAQGYTTTVSSAVSSSSLKSTTINPAKTATLTASSSTVITSSTESVGSSTVSSASSSSVTTSYATSSSTVVSSDATSSTTTTSSVATSSSTTSSDPASSTTTASSSTTSSDLTSSTTSSSSSTTSSDPTSSTAASSSSTTSSDPVSSSAAASSSASTENAASSSSAISSSSSMVSAPLSSTLTTSAASSRSVTSSSVNSVKFANTTVFSAQTTSSVSASLSSSVAADDIQGSTSKEATSSVSEHTSIVTSATNAAQYATRLGSSSRSSSGAVSSSAVSQSALNSVIAVNTDVSVTSVSSAAHTTKDTATTSVTASESITSDTAQVSSSTEKKISNSAATSSSIYSNSASVSGHGVTYAAEYAITSEQSSALATSVPATNRSSIVKTTTLENSSTATITTITKSATTLATTANNSTRAATAVTIDPTLDPTDNSASPTDNAKHTSTYGSSSTGASLDSLRTTTSISASSNTTQLVSTCTSESDYSDSPSFAISTATTTESNLITNTITASCSTDSNLPISAASSTDETAFTRTISTSCSTLNGASTQTSELSTSPMKTNTVVPASSFPSTTTTCLENDNTAFSSIYTEVNAATIINPGETSSLASDFATSEKPNEPTSVKSTSNEGTSSTTTTYQQTVATLYAKPSSTSLGARTTTGSNGRSTTSQQDGSAMHQPTSSIYTQLKEGTSTTAKLSAYEGAATPLSIFQCNSLAGTIAAFVVAVLFAF

SEQ ID NO: 21269 - protein, 234 aa, Saccharomyces cerevisiae
MSKSDLAVEIIAAQRPRVRLMGAFINKCSDLTISDITIDIRDGDSAGGHNTDGFDVGSSSNVLIQGCTVYNQDDCIAVNSGSTIKFMNNYCYNGHGISVGSVGGRSDNTVNGFWAENNHVINSDNGLRIKTVEGATGTVTNVNFISNKISGIKSYGIVIEGDYLNGKTTGTATGGVPISNLVMKDITGSVNSTAKRVKILVKNATNWQWSGVSITGGSSYSGCSGIPSGSGASC

SEQ ID NO: 21270 - protein, 186 aa, Saccharomyces cerevisiae
MRFPSIFTAVLFAASSALAAPVNTTTEDETAQIPAEAVIGYLDLEGDFDVAVLPFSNSTNNGLLFINTTIASIAAKEEGVSLDKREAEAWHWLQLKPGQPMYKREADAEAWHWLQLKPGQPMYKREADAEAWHWLQLKPGQPMYKREADAEAWHWLQLKPGQPMYKREADAEAWHWLQLKPGQPMY

SEQ ID NO: 21271 - protein, 336 aa, Saccharomyces cerevisiae
MKFSKVSLLAASASVALSAPVAVTVTQHVHQAATVVVQGIVRVENGQTLTTFITKGTQTASASPVATTSAPIVVANAQVDSIATSVIQESAVVAESATFEESSTETSEAFSTATATIQAVQTSASATQDDVTTTLTSSTQPTSTTTPTTTTTSPTTTTSPTTTASPTTTASPTTTTASPTTATTTQSTASSTQSSSSDFSTSMVNEHNTKRALHKDTGSLTWSDTLATYAQNYADSYDCSGNLVHSGGPYGENLALGYGTTGSVDAWYNEITSYDYSNPGFSESAGHFTQVVWKGTSEVGCGLKSCGGAWGDYIICSYKAAGNVIGEFADNVMPLA

SEQ ID NO: 21272 - protein, 662 aa, Saccharomyces cerevisiae
MTKETIRVVICGDEGVGKSSLIVSLTKAEFIPTIQDVLPPISIPRDFSSSPTYSPKNTVLIDTSDSDLIALDHELKSADVIWLVYCDHESYDHVSLFWLPHFRSLGLNIPVILCKNKCDSISNVNANAMVVSENSDDDIDTKVEDEEFIPILMEFKEIDTCIKTSAKTQFDLNQAFYLCQRAITHPISPLFDAMVGELKPLAVMALKRIFLLSDLNQDSYLDDNEILGLQKKCFNKSIDVNELNFIKDLLLDISKHDQEYINRKLYVPGKGITKDGFLVLNKIYAERGRHETTWAILRTFHYTDSLCINDKILHPKLVVPDTSSVELSPKGYRFLVDIFLKFDIDNDGGLNNQELHRLFKCTPGLPKLWTSTNFPFSTVVNNKGCITLQGWLAQWSMTTFLNYSTTTAYLVYFGFQEDARLALQVTKPRKMRRRSGKLYRSNINDRKVFNCFVIGKPCCGKSSLLEAFLGRSFSEEYSPTIKPRIAVNSLELKGGKQYYLILQELGEQEYAILENKDKLKECDIICLTYDSSDPESFSYLVSLLDKFTHLQDLPLVFVASKADLDKQQQRCQIQPDELADELFVNHPLHISSRWLSSLNELFIKITEAALDPGKNTPGLPEETAAKDVDYRQTALIFGSTVGFVALCSFTLMKLFKSSKFSK

SEQ ID NO: 21273 - protein, 120 aa, Saccharomyces cerevisiae; identical to SEQ ID NO: 21131

SEQ ID NO: 21274 - protein, 276 aa, Saccharomyces cerevisiae; identical to SEQ ID NO: 21104

SEQ ID NO: 21275 - protein, 299 aa, Saccharomyces cerevisiae; identical to SEQ ID NO: 21170

SEQ ID NO: 21276 - protein, 293 aa, Saccharomyces cerevisiae
MISANSLLISTLCAFAIATPLSKRDSCTLTGSSLSSLSTVKKCSSIVIKDLTVPAGQTLDLTGLSSGTTVTFEGTTTFQYKEWSGPLISISGSKISVVGASGHTIDGQGAKWWDGLGDSGKVKPKFVKLALTGTSKVTGLNIKNAPHQVFSINKCSDLTISDITIDIRDGDSAGGHNTDGFDVGSSSNVLIQGCTVYNQDDCIAVNSGSTIKFMNNYCYNGHGISVGSVGGRSDNTVNGFWAENNHVINSDNGLRIKTVEGATGTVTNVNFISNKISGIKKLWYCYRRRLFEW

SEQ ID NO: 21277 - protein, 329 aa, Saccharomyces cerevisiae; identical to SEQ ID NO: 21171

SEQ ID NO: 21278 - protein, 165 aa, Saccharomyces cerevisiae; identical to SEQ ID NO: 21130

SEQ ID NO: 21279 - protein, 894 aa, Saccharomyces cerevisiae
MLEFPISVLLGCLVAVKAQTTFPNFESDVLNEHNKFRALHVDTAPLTWSDTLATYAQNYADQYDCSGVLTHSDGPYGENLALGYTDTGAVDAWYGEISKYNYSNPGFSESTGHFTQVVWKSTAEIGCGYKYCGTTWNNYIVCSYNPPGNYLGEFAEEVEPLISTVSSSSSSSSSTSTTSDTVSTIPSSIMPAVAQGYTTTVSSAASSSSLKSTTINPAKTATLTASSSTVITSSTESVGSSTVSSASSSSVTTSYATSSSTVVSSDATSSTTTTSSVATSSSTTSSDPASSTTTASSSTTSSDPTSSTAAASSSDPASSSAAASSSASTENAASSSSAISSSSSMVSAPLSSTLTTSTASSRSVTSSSVNSVKFANTTVFSAQTTSSVSASLSSSVAADDIQGSTSKEATSSVSEHTSIVTSATNAAQYATRLGSSSRSSSGAVSSSAVSQSVLNSVIAVNTDVSVTSVSSAAHTTKDTATTSVTASESITSETAQASSSTEKNISNSAATSSSIYSNSASVSGHGVTYAAEYAITSSALATSVPATNCSSIVKTTTLENSSTTTITAITKSITTLATTANNSTRAATAVTIDPTLDPTDNSASPTDNAKHTSTYGSSSTGASLDSLRTTTSISVSSNTTQLVSTCTSESNYSDSPSFAISTATTTESNLITNTITASCSTDSNFPISAASSTDETAFTRTISTSCSTLNGASTQTSELTTSPMKTNTVVPASSFPSTTTTCLENDDTAFSSIYTEVNAATIINPGETSSLASDFATSEKPNEPTSVKSTSNEGTSSTTTTYQQTVATLYAKPSSTSLGARTTTGSNGRSTTSQQDGSAMHQPTSSIYTQLKEGTSTTAKLSAYEGAATPLSIFQCNSLAGTIAAFVVAVLFAF

SEQ ID NO: 21280 - protein, 361 aa, Saccharomyces cerevisiae; identical to SEQ ID NO: 21256

SEQ ID NO: 21281 - protein, 299 aa, Saccharomyces cerevisiae; identical to SEQ ID NO: 21170

SEQ ID NO: 21282 - protein, 165 aa, Saccharomyces cerevisiae; identical to SEQ ID NO: 21130

SEQ ID NO: 21283 - protein, 662 aa, Saccharomyces cerevisiae; identical to SEQ ID NO: 21258

SEQ ID NO: 21284 - protein, 268 aa, Saccharomyces cerevisiae; identical to SEQ ID NO: 21102

SEQ ID NO: 21285 - protein, 329 aa, Saccharomyces cerevisiae; identical to SEQ ID NO: 21171

SEQ ID NO: 21286 - protein, 897 aa, Saccharomyces cerevisiae
MLEFPISVLLGCLVAVKAQTTFPNFESDVLNEHNKFRALHVDTAPLTWSDTLATYAQNYADQYDCSGVLTHSDGPYGENLALGYTDTGAVDAWYGEISKYNYSNPGFSESTGHFTQVVWKSTAEIGCGYKYCGTTWNNYIVCSYNPPGNYLGEFAEEVEPLISTVSSSSSSSSSTSTTSDTVSTISSSIMPAVAQGYTTTVSSAASSSSLKSTTINPAKTATLTASSSTVITSSTESVGSSTVSSASSSSVTTSYATSSSTVVSSDATSSTTTTSSVATSSSTTSSDPASSTTTASSSTTSSDPTSSTAAASSSDPASSSAAASSSASTENAASSSSAISSSSSMVSAPLSSTLTTSTASSRSVTSSSVNSVKFANTTVFSAQTTSSVSASLSSSVAADDIQGSTSKEATSSVSEHTSIVTSAINAAQYATRLGSSSRSSSGAVSSSAVSQSVLNSVIAVNTDVSVTSVSSAAHTTKDTATTSVTASESITSETAQASSSTEKNISNSAATSSSIYSNSASVSGHGVTYAAEYAITSEQSSALATSVPATNCSSIVKTTTLENSSTTTITAITKSTTTLATTANNSTRAATAVTIDPTLDPTDNSASPTDNAKHTSTYGSSSTGASLDSLRTTTSISVSSNTTQLVSTCTSESNYSDSPSFAISTATTTESNLITNTITASCSTDSNFPISAASSTDETAFTRTISTSCSTLNGASTQTSELTTSPMKTNTVVPASSFPSTTTTCLENDDTAFSSIYTEVNAATIINPGETSSLASDFATSEKPNEPTSVKSTSNEGTSSTTTTYQQTVATLYAKPSSTSLGARTTTGSNGRSTTSQQDGSAMHQPTSSIYTQLKEGTSTTAKLSAYEGAATPLSIFQCNSLAGTIAAFVVAVLFAF

SEQ ID NO: 21287 - protein, 662 aa, Saccharomyces cerevisiae; identical to SEQ ID NO: 21258

SEQ ID NO: 21288 - protein, 120 aa, Saccharomyces cerevisiae; identical to SEQ ID NO: 21131

SEQ ID NO: 21289 - protein, 120 aa, Saccharomyces cerevisiae; identical to SEQ ID NO: 21131

SEQ ID NO: 21290 - protein, 268 aa, Saccharomyces cerevisiae; identical to SEQ ID NO: 21102

SEQ ID NO: 21291 - protein, 288 aa, Saccharomyces cerevisiae
  MOD_RES (277)..(277): Any amino acid
MRLQRNSIICALVFLVSFVLGDVNIVSPSSKATFSPSGGTVSVPVEWMDNGAYPSLSKISTFTFSLCTGPNNNIDCVAVLASKITPSELTQDDKVYSYTAEFASTLTGNGQYYIQVFAQVDGQGYTIHYTPRFQLTSMGGVTAYTYSATTEPTPQTSIQTTTTNNAQATTIDSRSFTVPYTKQTGTSRFAPMQMQPNTKVTATTWTRKFATSAVTYYSTFGSLPEQATTITPGWSYTISSGVNYATPASMPSDNGGWYKPSKRLSLSARKINMRKVXKNRRLLLSSLQ

SEQ ID NO: 21292 - protein, 120 aa, Saccharomyces sp.; identical to SEQ ID NO: 21131
  Saccharomyces cerevisiae x Saccharomyces kudriavzevii

SEQ ID NO: 21293 - protein, 130 aa, Saccharomyces sp.
  Saccharomyces cerevisiae x Saccharomyces kudriavzevii
MRFSSIITAVFAASSALAAPVNTTSESETVQIPAEAIIGYLDLEGDFDVAVLPFANSTNNGLLFINTTIANLATKEESVPLSKREAEADAEAWHWLQLKPGQPMYKREAEAEADAEAWHWLQLKPGQPMY

SEQ ID NO: 21294 - protein, 361 aa, Saccharomyces sp.; identical to SEQ ID NO: 21256
  Saccharomyces cerevisiae x Saccharomyces kudriavzevii

SEQ ID NO: 21295 - protein, 631 aa, Saccharomyces sp.
  Saccharomyces cerevisiae x Saccharomyces kudriavzevii
MPTIQDVLPPISIPRDFSSLPSYSPRNTVLIDTSDSDLIVLDHELKSADVIWLVYCDHESYDHVSLFWLPHFRSLGLNIPVILCKNKCDSISDANANAMMAPANSDDIDTKVEDEEFIPILMEFKEIDTCIKTSAKTQFDLNQAFYLCQRAITHPISPLFDAMIGELKPLAVMALKRIFLLSDLNQDSYLDDGEILGLQKKCFNKSIDVNELNFIKDMLSDISKHDQQYANRKLYVAGKGITKDGFLVLNKIYAERGRHETMWAILRTFHYTDSLCINDKILHPRLVVPDTSSVELSPKGYRFLVDIFLKFDTDNDGGLNNQELHRLFKCTPGLPESWISTNFPFSTVVNNKSCITLQGWLAQWSMTTFLNYSTTTAYLVYFGFQEDARLALQVTKPRKMRRRSGKLYRSIVNDRKVFNCFVIGKPCCGKSSLLEAFLGRSFSEEYSPTIKPRIAVNSLELKGGKQYYLILQELGEQEYAILENKDKLKECDVICLTYDSSDPESFSYLVSLLDKFAHLQDLPLVFVASKADLDKQQQRCHVQPDELADELFVNHPLHISSRWLSSLNELFIKITEAALDPGKNTPGLPEEAPTKDVDYRQTALILGSTVGFIALCSFTLMKLFKPSKFHK

SEQ ID NO: 21296 - protein, 268 aa, Saccharomyces sp.
  Saccharomyces cerevisiae x Saccharomyces kudriavzevii
MLIILFLTLFCSVVFRTAYCDVAIVAPEPNSVYDLSGTSQAVVKVKWMHTDNTPQEKDFVRYTFTLCSGTNAMIEAMATLQTLSASDLTDNEFNAIIENTVGTDGVYFIQVFAQTAIGYTIHYTNRFKLKGMIGTKAANPSMITIAPEAQTRITTGDVGATIDSKSFTVPYNLQTGVVKYAPMQLQPATKVTAKTWKRKYATSEVTYYYTLRNSVDQHTTVTPGWSYIITADSNYATPAPMPADNGGWYNPRKRLSLTARKVNALRHR

SEQ ID NO: 21297 - protein, 202 aa, Saccharomyces sp.
  Saccharomyces cerevisiae x Saccharomyces kudriavzevii
MLVVPFLALLCSLALQTVYCDVAIVGPLPNSVFDLSGSGQSTIKVKWMHTDSTPQEKDFIKYTFTLCTGTNAMIEAMASLQTLTAAELTDNEFEAVIKNTVGTDGVYFIQVFAQTAIGYTIHYTNRFKLKGMVGAKVASPSMITIAPEAQTRITTGDLGATIDSRSFTVPYNLQTGVVKYAPMQLQPGYESNGEDMEKKVRH

SEQ ID NO: 21298 - protein, 341 aa, Saccharomyces sp.
  Saccharomyces cerevisiae x Saccharomyces kudriavzevii
MKFSKVSLLAASASVALSAPVAVTVTQHVHQAATVVVQGIVRVENGQTLTTFITKGTQTASASPVATTSAPIVVANAQVDSIATSVIQESAVVAESATFEESSTETSEAFSTATATIQAVQTSASATQDDVTTTLTSSTQPTSTTTPTTTTTSPTTTTSPTTTTSPTTTTSPTTTASPTTTASPTTATTTQSTASSTQSSSSDFSTSMVNEHNTKRALHKDTGSLTWSDTLATYAQNYADSYDCSGNLVHSGGPYGENLALGYGTTGSVDAWYNEITSYDYSNPGFSESAGHFTQVVWKGTSEVGCGLKSCGGEWGDYIICSYKAAGNVIGEFADNVMPLA

SEQ ID NO: 21299 - protein, 662 aa, Saccharomyces sp.; identical to SEQ ID NO: 21258
  Saccharomyces cerevisiae x Saccharomyces kudriavzevii

SEQ ID NO: 21300 - protein, 276 aa, Saccharomyces sp.
  Saccharomyces cerevisiae x Saccharomyces kudriavzevii
MRLQRNSIICALVFLVSFVLGDVNIVSPSSKATFSPSGGTVSVPVEWMDNGAYPSLSKISTFTFSLCTGPNNNIDCVAVLASKITPSELTQDDKVYSYTTEFASTLTGNGQYYIQVFAQVDGQGYTIHYTPRFQLTSMGGVTAYTYSATTEPTPQTSIQTTTTNNAQATTIDSRSFTVPYTKQTGTSRFAPMQMQPNTKVTATTWTRKFATSAVTYYSTFGSLPEQATTITPGWSYTISSGVNYATPASMPSDNGGWYKPSKRLSLSARKINMRKV

SEQ ID NO: 21301 - protein, 293 aa, Saccharomyces sp.
  Saccharomyces cerevisiae x Saccharomyces kudriavzevii
MKLSKLSILTSALATTAFAAPAVVTVTEHAHNAAVVTVQGVVYVENGQILTTYKTFAPTSAAKPTSTATAVIAPPIASASASASGSSGSNAALSALQDLANVWGKTTDSTTTLTPSTSPSQSQPQATATASPTVTATTSQAAATSASASDDELSDFASSVLAEHNKKRALHKDTPALTWSNTLATYAQDYADNYDCSGTLTHSGGPYGENLALGYDGTSAVDAWYNEISSYDFSNPGFSGNTGHFTQVVWKSTTQVGCGIKTCGGAWGDYVICSYDPAGNYEGEYADNVEPLA

SEQ ID NO: 21302 - protein, 299 aa, Saccharomyces sp.; identical to SEQ ID NO: 21170
  Saccharomyces cerevisiae x Saccharomyces kudriavzevii

SEQ ID NO: 21303 - protein, 276 aa, Saccharomyces sp.
  Saccharomyces cerevisiae x Saccharomyces kudriavzevii
MRLQTNSILCALVFLITCVFADVNVVSPHSKATFSPSGETVSIPIEWMDNGAYPPLAKFASFTFTLCTGPNNNIQAVAIIASKIKPSQLTLDGSVYSYTATFPSTLAGDGQYYIQVYGWVDNQGSTTHYTPRFQLTSMGGTTAYTFSDSVAPTPQTSIQTTTTNNAQATTIDSRSFTVPYTQQTGTSRFAPMQMQPNTKVTATTWTRKYATSAVTYYSTFGSLPQQGTTLTPGWSYTISSGMNYATPAAMPSDNGGWYEPSKRLSLSARKINMRKA

SEQ ID NO: 21304 - protein, 290 aa, Saccharomyces sp.
  Saccharomyces cerevisiae x Saccharomyces kudriavzevii
MIFGNSLLLSTLYTFAVATPLLKRDSCTLSGSSLSSLSTVKKCTSIIIKDLTVPAGQTLDLSGLSKGTTVTFQGTTTFQYKEWAGPLISISGSKISVVGASGHVIDGQGAKWWDGLGDNGKVKPKFVKLALTGTSKVTGLNVKNAPHQVFSVNKCSDLTISGVTIDIRDGDSAGGHNTDAFDVGSSTNVVIQGCTVYNQDDCIAVNSGTTIKFLNNYCYNGHGISIGSVGGRSDNIVNGFWAENNHVINSDNGLRIKTVQGATGSVTNVNFITNTISNIKNTVLLLKVII

SEQ ID NO: 21305 - protein, 137 aa, Saccharomyces cerevisiae
MIGTKAANPSMITIAPEAQTRITTGDVGATIDSKSFTVPYNLQTGVVKYAPMQLQPATKVTAKTWKRKYATSEVTYYYTLRNSVDQHTTVTPGWSYIITADSNYATPAPMPADNGGWYNPRKRLSLTARKVNALRHR

SEQ ID NO: 21306 - protein, 120 aa, Saccharomyces cerevisiae; identical to SEQ ID NO: 21131

SEQ ID NO: 21307 - protein, 276 aa, Saccharomyces cerevisiae
  MOD_RES (17)..(17): Any amino acid
  MOD_RES (24)..(24): Any amino acid
MRLQRNSIICALVFLVXFVLGDVXIVSPSSKATFSPSGGTVSVPVEWMDNGAYPSLSKISTFTFSLCTGPNNNIDCVAVLASKITPSELTQDDKVYSYTAEFASTLTGNGQYYIQVFAQVDGZGYTIHYTPRFQLTSMGGVTAYTYSATTEPTPQTSIQTTTTNNAQATTIDSRSFTVPYTKQTGTSRFAPMQMQPNTKVTATTWTRKFATSAVTYYSTFGSLPEQATTITPGWSYTISSGVNYATPASMPSDNGGWYKPSKRLSLSARKINMRKV

SEQ ID NO: 21308 - protein, 384 aa, Saccharomyces cerevisiae
MISANSLLISTLCAFAIATPLSKRDSCTLTGSSLSSLSTVKKCSSIVIKDLTVPAGQTLDLTGLSSGTTVTFEGTTTFQYKEWSGPLISISGSKISVVGASGHTIDGQGAKWWDGLGDSGKVKPKFVKLALTGTSKVTGLNIKNAPHQVFSINKCSDLTISDITIDIRDGDSAGGHNTDGFDVGSSSNVLIQGCTVYNQDDCIAVNSGSTIKFMNNYCYNGHGISVGSVGGRSDNTVNGFWAENNYVINSDNGLRIKTVEGATGTVTNVNFISNKISGTKSYGIVIEGDYLNGKTTGTATGGVPISNLVMKDITGSVNSTAKRVKILVKNATNWQWSGVSIYRWFFLFWMFWNPIWIWCKLLILFKSTHMTIYTFFSFFYLFNT

SEQ ID NO: 21309 - protein, 897 aa, Saccharomyces cerevisiae
MLEFPISVLLGCLVAVKAQTTFPNFESDVLNEHNKFRALHVDTAPLTWSDTLATYAQNYADQYDCSGVLTHSDGPYGENLALGYTDTGAVDAWYGEISKYNYSNPGFSESTGHFTQVVWKSTAEIGCGYKYCGTTWNNYIVCSYNPPGNYLGEFAEEVEPLISTVSSSSSSSSSTSTTSDTVSTISSSIMPAVAQGYTTTVSSAASSSSLKSTTINPAKTATLTASSSTVITSSTESVGSSTVSSASSSSVTTSYATSSSTVVSSDATSSTTTTSSVATSSSTTSSDPASSTTTASSSTTSSDPTSSTGAASSSDPASSSAAASSSASTENAASSSGAISSSSSMVSAPLSSTLTTSTASSRSVTSSSVNSVKFANTTVFSAQTTSSVSASLSSSVAADDIQGSTSKEATSSVSEHTSIVTSATNAAQYATRLGSSSRSSSGAVSSSAVSQSVLNSVIAVNTDVSVTSVSSAAHTTKDTATTSVTASESITSETAQASSSTEKKISNSAATSSSIYSNSASVSGHGVTYAAEYAITSEQSSALATSVPATNCSSIVKTTTLENSSTTTITAITKSTTTLATTANNSTRAATAVTIDPTLDPTDNSASPTDNAKHTSTYGSSSTGASLDSLRTTTSISVSSNTTQLVSTCTSESDYSDSPSFAISTATTTESNLITNTITASCSTDSNFPTSAASSTDETAFTRTISTSCSTLNGASTQTSELTTSPMKTNTVVPASSSPSTTTTCLENDDTAFSSIYTEVNAATIINPGETSSLASDFATSEKPNEPTSVKSTSNEGTSSTTTTYQQTVATLYAKPSSTSLGARTTTGSNGRSTTSQQDGSAMHQPTSSIYTQLKEGTSTTAKLSAYEGAATPLSIFQCNSLAGTIAAFVVAVLFAF

SEQ ID NO: 21310 - protein, 268 aa, Saccharomyces cerevisiae
  MOD_RES (4)..(4): Any amino acid
MLIXLFLTLFCSVVFRTAYCDVAIVAPEPNSVYDLSGTSQAVVKVKWMHTDNTPQEKDFVRYTFTLCSGTNAMIEAMATLQTLSASDLTDNEFNAIIENTVGTDGVYFIQVFAQTAIGYTIHYTNRFKLKGMIGTKAANPSMITIAPEAQTRITTGDVGATIDSKSFTVPYNLQTGVVKYAPMQLQPATKVTAKTWKRKYATSEVTYYYTLRNSVDQHTTVTPGWSYIITADSNYATPAPMPADNGGWYNPRKRLSLTARKVNALRHR

SEQ ID NO: 21311 - protein, 894 aa, Saccharomyces cerevisiae
  MOD_RES (186)..(186): Any amino acid
  MOD_RES (573)..(573): Any amino acid
MLEFPISVLLGCLVAVKAQTTFPNFESDVLNEHNKFRALHVDTAPLTWSDTLATYAQNYADQYDCSGVLTHSDGPYGENLALGYTDTGAVDAWYGEISKYNYSNPGFSESTGHFTQVVWKSTAEIGCGYKYCGTTWNNYIVCSYNPPGNYLGEFAEEVEPLISTVSSSSSSSSSTSTTSDTVSTIXSSIMPAVAQGYTTTVSSAASSSSLKSTTINPAKTATLTASSSTVITSSTESVGSSTVSSASSSSVTTSYATSSSTVVSSDATSSTTTTSSVATSSSTTSSDPASSTTTASSSTTSSDPTSSTAAASSSDPASSSAAASSSASTENAASSSSAISSSSSMVSAPLSSTLTTSTASSRSVTSSSVNSVKFANTTVFSAQTTSSVSASLSSSVAADDIQGSTSKEATSSVSEHTSIVTSATNAAQYATRLGSSSRSSSGAVSSSAVSQSVLNSVIAVNTDVSVTSVSSAAHTTKDTATTSVTASESITSETAQASSSTEKNISNSAATSSSIYSNSASVSGHGVTYAAEYAITSSALATSVPATNCSSIVKTTTLENSSTTTITAITKSXTTLATTANNSTRAATAVTIDPTLDPTDNSASPTDNAKHTSTYGSSSTGASLDSLRTTTSISVSSNTTQLVSTCTSESNYSDSPSFAISTATTTESNLITNTITASCSTDSNFPISAASSTDETAFTRTISTSCSTLNGASTQTSELTTSPMKTNTVVPASSFPSTTTTCLENDDTAFSSIYTEVNAATIINPGETSSLASDFATSEKPNEPTSVKSTSNEGTSSTTTTYQQTVATLYAKPSSTSLGARTTTGSNGRSTTSQQDGSAMHQPTSSIYTQLKEGTSTTAKLSAYEGAATPLSIFQCNSLAGTIAAFVVAVLFAF

SEQ ID NO: 21312 - protein, 276 aa, Saccharomyces cerevisiae; identical to SEQ ID NO: 21104

SEQ ID NO: 21313 - protein, 361 aa, Saccharomyces cerevisiae; identical to SEQ ID NO: 21256

SEQ ID NO: 21314 - protein, 299 aa, Saccharomyces cerevisiae; identical to SEQ ID NO: 21170

SEQ ID NO: 21315 - protein, 186 aa, Saccharomyces cerevisiae
MRFPSIFTAVLFAASSALAAPVNTTTEDETAQIPAEAVIGYLDLEGDFDVAVLPFSNSTNNGLLFINTTIASIAAKEEGVSLDKREAEAWHWLQLKPGQPMYKREAEAEAWHWLQLKPGQPMYKREADAEAWHWLQLKPGQPMYKREADAEAWHWLQLKPGQPMYKREADAEAWHWLQLKPGQPMY

SEQ ID NO: 21316 - protein, 120 aa, Saccharomyces cerevisiae; identical to SEQ ID NO: 21131

SEQ ID NO: 21317 - protein, 120 aa, Saccharomyces cerevisiae; identical to SEQ ID NO: 21131

SEQ ID NO: 21318 - protein, 299 aa, Saccharomyces cerevisiae; identical to SEQ ID NO: 21170

SEQ ID NO: 21319 - protein, 894 aa, Saccharomyces cerevisiae
MLEFPISVLLGCLVAVKAQTTFPNFESDVLNEHNKFRALHVDTAPLTWSDTLATYAQNYADQYDCSGVLTHSDGPYGENLALGYTDTGAVDAWYGEISKYNYSNPGFSESTGHFTQVVWKSTAEIGCGYKYCGTTWNNYIVCSYNPPGNYLGEFAEEVEPLISTVSSSSSSSSSTSTTSDTVSTISSSIMPAVAQGYTTTVSSAASSSSLKSTTINPAKTATLTASSSTVITSSTESVGSSTVSSASSSSVTTSYATSSSTVVSSDATSSTTTTSSVATSSSTTSSDPASSTTTASSSTTSSDPTSSTAAASSSDPASSSAAASSSASTENAASSSSAISSSSSMVSAPLSSTLTTSTASSRSVTSSSVNSVKFANTTVFSAQTTSSVSASLSSSVAADDIQGSTSKEATSSVSEHTSIVTSATNAAQYATRLGSSSRSSSGAVSSSAVSQSVLNSVIAVNTDVSVTSVSSAAHTTKDTATTSVTASESITSETAQASSSTEKNISNSAATSSSIYSNSASVSGHGVTYAAEYAITSSALATSVPATNCSSIVKTTTLENSSTTTITAITKSTTTLATTANNSTRAATAVTIDPTLDPTDNSASPTDNAKHTSTYGSSSTGASLDSLRTTTSISVSSNTTQLVSTCTSESNYSDSPSFAISTATTTESNLITNTITASCSTDSNFPISAASSTDETAFTRTISTSCSTLNGASTQTSELTTSPMKTNTVVPASSFPSTTTTCLENDDTAFSSIYTEVNAATIINPGETSSLASDFATSEKPNEPTSVKSTSNEGTSSTTTTYQQTVATLYAKPSSTSLGARTTTGSNGRSTTSQQDGSAMHQPTSSIYTQLKEGTSTTAKLSAYEGAATPLSIFQCNSLAGTIAAFVVAVLFAF

SEQ ID NO: 21320 - protein, 267 aa, Saccharomyces cerevisiae
MISANSLLISTLCAFAIATPLSKRDSCTLTGSSLSSLSTVKKCSSIVIKDLTVPAGQTLDLTGLSSGTTVTFEGTTTFQYKEWSGPLISISGSKISVVGASGHTIDGQGAKWWDGLGDSGKVKPKFVKLALTGTSKVTGLNIKNAPHQVFSINKCSDLTISDITIDIRDGDSAGGHNTDGFDVGSSSNVLIQGCTVYNQDDCIAVNSGSTIKFMNNYCYNGHGISVGSVGGRSDNTVNGFWAENNHVINSDNGLRIKTVEGATGTVN

SEQ ID NO: 21321 - protein, 144 aa, Saccharomyces cerevisiae
  MOD_RES (107)..(107): Any amino acid
MRFPSIFTAVLFAASSALAAPVNTTTEDETAQIPAEAVIGYLDLEGDFDVAVLPFSNSTNNGLLFINTTIASIAAKEEGVSLDKREAEAWHWLQLKPGQPMYKREAXAEAWHWLQLKPGQPMYKREADAEAWHWLQLKPGQPMY

SEQ ID NO: 21322 - protein, 329 aa, Saccharomyces cerevisiae; identical to SEQ ID NO: 21171

SEQ ID NO: 21323 - protein, 268 aa, Saccharomyces cerevisiae; identical to SEQ ID NO: 21310
  MOD_RES (4)..(4): Any amino acid

SEQ ID NO: 21324 - protein, 276 aa, Saccharomyces cerevisiae; identical to SEQ ID NO: 21104

SEQ ID NO: 21325 - protein, 329 aa, Saccharomyces cerevisiae; identical to SEQ ID NO: 21171

SEQ ID NO: 21326 - protein, 662 aa, Saccharomyces cerevisiae; identical to SEQ ID NO: 21258

SEQ ID NO: 21327 - protein, 86 aa, Saccharomyces cerevisiae
MRFPSIFTAVLFAASSALAAPVNTTTEDETAQIPAEAVIGYSDLEGDFDVAVLPFSNSTNNGLLFINTTIASIAAKEEGVSLDKRF

SEQ ID NO: 21328 - protein, 299 aa, Saccharomyces cerevisiae; identical to SEQ ID NO: 21170

SEQ ID NO: 21329 - protein, 276 aa, Saccharomyces cerevisiae; identical to SEQ ID NO: 21104

SEQ ID NO: 21330 - protein, 268 aa, Saccharomyces cerevisiae; identical to SEQ ID NO: 21102

SEQ ID NO: 21331 - protein, 337 aa, Saccharomyces cerevisiae
MLEFPISVLLGCLVAVKAQTTFPNFESDVLNEHNKFRALHVDTAPLTWSDTLATYAQNYADQYDCSGVLTHSDGPYGENLALGYTDTGAVDAWYGEISKYNYSNPGFSESTGHFTQVVWKSTAEIGCGYKYCGTTWNNYIVCSYNPPGNYLGEFAEEVEPLISTVSSSSSSSSSTSTTSDTVSTISSSIMPAVAQGYTTTVSSAASSSSLKSTTINPAKTATLTASSSTVITSSTESVGSSTVSSASSSSVTTSYATSSSTVVSSDATSSTTTTSSVATSSSTTSSDPASSTTTASSSTTSSDPTSSTAAASSSDPASSSAAASSSASTENAASSSS

SEQ ID NO: 21332 - protein, 897 aa, Saccharomyces cerevisiae
MLEFPISVLLGCLVAVKAQTTFPNFESDVLNEHNKFRALHVDTAPLTWSDTLATYAQNYADQYDCSGVLTHSDGPYGENLALGYTDTGAVDAWYGEISKYNYSNPGFSESTGHFTQVVWKSTAEIGCGYKYCGTTWNNYIVCSYNPPGNYLGEFAEEVEPLISTVSSSSSSSSSTSTTSDTVSTISSSIMPAVAQGYTTTVSSAASSSSLKSTTINPAKTATLTASSSTVITSSTESVGSSTVSSASSSSVTTSYATSSSTAVSSDATSSTTTTSSVATSSSTTSSDPASSTTTASSSTTSSDPTSSTAAASSSDPASSSAAASSSASTENAASSSSAISSSSSMVSAPLSSTLTTSTASSRSVTSNSVNSVKFANTTVFSAQTTSSVSASLSSSVAADDIQGSTSKEATSSVSEHTSIVTSATNAAQYATRLGSSSRSSSGAVSSSAVSQSVLNSVIAVNTDVSVTSVSSAAHTTKDTATTSVTASESITSETAQASSSTEKNISNSAATSSSIYSNSASVSGHGVTYAAEYAITSEQSSALATSVPATNCSSIVKTTTLENSSTTTITAITKSTTTLATTAKNSTRAATAVTIDPTLDPTDNSASPTDNAKHTSTYGSSSTGASLDSLRTTTSISVSSNTTQLVSTCTSESNYSDSPSFAISTATTTESNLITNTITASCSTDSNFPISAASSTDETAFTRTISTSCSTLNGASTQTSELTTSPMKTNTVVPASSFPSTTTTCLENDDTAFSSIYTEVNAATIINPGETSSLASDFATSEKPNEPTSVKSTSNEGTSSTTTTYQQTVATLYAKPSSTSLGARTTTGSNGRSTTSQQDGSAMHQPTSSIYTQLKEGTSTTAKLSAYEGAATPLSIFQCNSLAGTIAAFVVAVLFAF

SEQ ID NO: 21333 - protein, 120 aa, Saccharomyces cerevisiae; identical to SEQ ID NO: 21131

SEQ ID NO: 21334 - protein, 299 aa, Saccharomyces cerevisiae; identical to SEQ ID NO: 21170

SEQ ID NO: 21335 - protein, 144 aa, Saccharomyces cerevisiae; identical to SEQ ID NO: 21257

SEQ ID NO: 21336 - protein, 276 aa, Saccharomyces cerevisiae; identical to SEQ ID NO: 21104

SEQ ID NO: 21337 - protein, 268 aa, Saccharomyces cerevisiae; identical to SEQ ID NO: 21102

SEQ ID NO: 21338 - protein, 662 aa, Saccharomyces cerevisiae; identical to SEQ ID NO: 21258

SEQ ID NO: 21339 - protein, 329 aa, Saccharomyces cerevisiae; identical to SEQ ID NO: 21171

SEQ ID NO: 21340 - protein, 299 aa, Saccharomyces cerevisiae
MKLSKLSILTSALATSALAAPAVVTVTEHAHEAAVVTVQGVVYVENGQTRTTYETLAPASTATPTSTATALVAPPVALSSASSNSDAVLSALKNLASVWGKTTDSTTTLTPSESTSQSLAQATTTSTPAAASTTSTPAATTTTSQAAATSSASSSDSDLSDFASSVLAEHNKKRALHKDTPALSWSDTLASYAQDYADNYDCSGTLTHSGGPYGENLALGYDGPAAVDAWYNEISNYDFSNPGFSSNTGHFTQVVWKSTTQVGCGIKTCGGAWGDYVICSYDPAGNYEGEYADNVEPLA

SEQ ID NO: 21341 - protein, 276 aa, Saccharomyces cerevisiae
MRLQRNSIICALVFLVSFVLGDVNIVSPSSKATFSPSGGTVSVPVEWMDNGAYPSLSKISTFTFSLCTGPNNNIDCVAVLASKITPSELTQDDKVYSYTAEFASTLTGNGQYYIQVFAQVDGQGYTLHYTPRFQLTSMGGVTAYTYSATTEPTPQTSIQTTTTNNAQATTIDSRSFTVPYTKQTGTSRFAPMQMQPNTKVTATTWTRKFATSAVTYYSTFGSLPEQATTITPGWSYTISSGVNYATPASMPSDNGGWYKPSKRLSLSARKINMRKV

SEQ ID NO: 21342 - protein, 662 aa, Saccharomyces cerevisiae; identical to SEQ ID NO: 21258

SEQ ID NO: 21343 - protein, 186 aa, Saccharomyces cerevisiae; identical to SEQ ID NO: 21315

SEQ ID NO: 21344 - protein, 914 aa, Saccharomyces cerevisiae
MLEFPISVLLGCLVAVKAQTTFPNFESDVLNEHNKFRALHVDTAPLTWSDTLATYAQNYADQYDCSGVLTHSDGPYGENLALGYTDTGAVDAWYGEISKYNYSNPGFSESTGHFTQVVWKSTAEIGCGYKYCGTTWNNYIVCSYNPPGNYLGEFAEEVEPLISTVSSSSSSSSSSTSTTSETVSTISSSIMPAVAQGYTTTVSSAASSSSLKSTTINPAKTATLTASSSTVITSSTESVGSSTVSSASSSSVTTSSSTVVSSDATSSTTTTSSVATSSSTTSSDPGSSTTTASSSTTSSDLTSSTTSSSSSTTSSDPTSSTAASSSSTTSSDPVSSSAAASSSASTENAASSSSAISSSSSMVSAPLSSTLTTSAASSRSVTSSSVNSVKFANTTVFSAQTTSSVSASLSSSVAADDIQGSTSKEATSSVSEHTSIVTSATNAAQYATRLGSSSRSSSGAVSSSAVSQSALNSVIAVNTDVSVTSVSSAAHTTKDTATTSVTASESITSDTAQVSSSTEKKISNSAATSSSIYSNSASVSGHGVTYAAEYAITSEQSSALATSVPATNRSSIVKTTTLENSSTATITAITESTTTLATTANNYTRAATAVTIDPTLDPTDNSASPTDNAKHTSTYGSSSTGASLDSLRTTTSISASSNTTQLVSTCTSESDYSDSPSFAISTATTTESNLITNTITASCSTDSNFPISAASSTDETAFTRTISTSCSTLNGASTQTSELSTSPMKTNTVVPASSFPSTTTTCLENDDTAFSSIYTEVNAATIINPGETSSLASDFATSEKPNEPTSVKSTSNEGTSSTTTTYQQTVATLYAKPSSTSLGARTTTGSNGRSTTSQQDGSAMHQPTSSIYTQLKEGTSTTAKLSAYEGAATPLSIFQCNSLAGTIAAFVVAVLFAF

SEQ ID NO: 21345 - protein, 268 aa, Saccharomyces cerevisiae; identical to SEQ ID NO: 21102

SEQ ID NO: 21346 - protein, 341 aa, Saccharomyces cerevisiae
MKFSKVSLLAASASVALSAPVAVTVTQHVHQAATVVVQGIVRVENGQTLTTFITKGTQTASASPVATTSAPIVVANAQVDSIATSVIQESTVVAESATFEESSTETSEAFSTATATIQAVQTSASATQDDVTTTLTSSTQPTSTTTPTTTTTSPTTTTSPTTTTSPTTTTSPTTTASPTTTASPTTATTTQSTASSTQSSSSDFSTSMVNEHNTKRALHKDTGSLTWSDTLATYAQNYADSYDCSGNLVHSGGPYGENLALGYGTTGSVDAWYNEITSYDYSNPGFSESAGHFTQVVWKGTSEVGCGLKSCGGEWGDYIICSYKAAGNVIGEFADNVMPLA

SEQ ID NO: 21347 - protein, 120 aa, Saccharomyces cerevisiae; identical to SEQ ID NO: 21131

SEQ ID NO: 21348 - protein, 361 aa, Saccharomyces cerevisiae; identical to SEQ ID NO: 21256

SEQ ID NO: 21349 - protein, 120 aa, Saccharomyces cerevisiae; identical to SEQ ID NO: 21131

SEQ ID NO: 21350 - protein, 165 aa, Saccharomyces cerevisiae
  MOD_RES (72)..(72): Any amino acid
MRFPSIFTAVLFAASSALAAPVNTTTEDETAQIPAEAVIGYLDLEGDFDVAVLPFSNSTNNGLLFINTTIAXIAAKEEGVSLDKREAEAWHWLQLKPGQPMYKREAEAEAWHWLQLKPGQPMYKREADAEAWHWLQLKPGQPMYKREADAEAWHWLQLKPGQPMY

SEQ ID NO: 21351 - protein, 329 aa, Saccharomyces cerevisiae
  MOD_RES (69)..(69): Any amino acid
  MOD_RES (164)..(164): Any amino acid
  MOD_RES (170)..(170): Any amino acid
MKFSKVSLLAASASVALSAPVAVTVTQHVHQAATVVVQGIVRVENGQTLTTFITKGTQTASASPVATTXAPIVVANAQVDSIATSVIQESAVVAESATFEESSTETSEAFSTATATIQAVQTSASATQDDVTTTLTSSTQPTSTTTPTTTTTSPTTTTSPTTTXSPTTTXSPTTATTTQSTASSTQSSSSDFSTSMVNEHNTKRALHKDTGSLTWSDTLATYAQNYADSYDCSGNLVHSGGPYGENLALGYGTTGSVDAWYNEITSYDYSNPGFSESAGHFTQVVWKGTSEVGCGLKSCGGEWGDYIICSYKAAGNVIGEFADNVMPLA

SEQ ID NO: 21352 - protein, 894 aa, Saccharomyces cerevisiae
MLEFPISVLLGCLVAVKAQTTFPNFESDVLNEHNKFRALHVDTAPLTWSDTLATYAQNYADQYDCSGVLTHSDGPYGENLALGYTDTGAVDAWYGEISKYNYSNPGFSESTGHFTQVVWKSTAEIGCGYKYCGTTWNNYIVCSYNPPGNYLGEFAEEVEPLISTVSSSSSSSSSTSTTSDTVSTISSSIMPAVAQGYTTTVSSAASSSSLKSTTINPAKTATLTASSSTVITSSTESVGSSTVSSASSSSVTTSYATSSSTVVSSDATSSTTTTSSVATSSSTTSSDPASSTTTASSSTTSSDPTSSTAAASSSDPASSSAAASSSASTENAASSSSAISSSSSMVSAPLSSTLTTSTASSRSVTSSSVNSVKFANTTVFSAQTTSSVSASLSSSVAADDIQGSTSKEATSSVSEHTSIVTSATNAAQYATRLGSSSRSSSGAVSSSAVSQSVLNSVIAVNTDVSVTSVSSAAHTTKDTATTSVTASESITSETAQASSSTEKNISNSAATSSSIYSNSASVSGHGVTYAAEYAITSSALATSVPATNCSSIVKTTTLENSSTTTITAITKSTTTLATTANNSTRAATAVTIDPTLDPTDNSASPTDNAKHTSTYGSSSTGASLDSLRTTTSISVSSNTTQLVSTCTSESDYSDSPSFAISTATTTESNLITNTITASCSTDSNFPTSAASSTDETAFTRTISTSCSTLNGASTQTSELTTSPMKTNTVVPASSFPSTTTTCLENDDTAFSSIYTEVNAATIINPGETSSLASDFATSEKPNEPTSVKSTSNEGTSSTTTTYQQTVATLYAKPSSTSLGARTTTGSNGRSTTSQQDGSAMHQPTSSIYTQLKEGTSTTAKLSAYEGAATPLSIFQCNSLAGTIAAFVVAVLFAF

SEQ ID NO: 21353 - protein, 276 aa, Saccharomyces cerevisiae; identical to SEQ ID NO: 21104

SEQ ID NO: 21354 - protein, 268 aa, Saccharomyces cerevisiae; identical to SEQ ID NO: 21102

SEQ ID NO: 21355 - protein, 299 aa, Saccharomyces cerevisiae; identical to SEQ ID NO: 21170

SEQ ID NO: 21356 - protein, 414 aa, Synechococcus sp.
MLRKRLQAGLCSLLLVLVLVFGPMERAIAFTDEQDLLLQAWRYVSQAYVDETFNHQNWWLIRQKFLKRPLKTRDEAYEAVGEMLALLDDPYTRLLRPEQYRSLKVSTSGELSGVGLQINVNPEVDVLEVILPLPGSPAEAAGIEAKDQILAIDGIDTRNIGLEEAAARMRGKKGSTVSLTVKSPKTDTVRTVKVTRDTIALNPVYDKLDEKNGEKVGYIRLNQFSANAKTEIIKSLNQLQKQGADRYVLDLRNNPGGLLQAGIEIARLWLDQETIVYTVNRQGIFESYSAVGQPLTDAPLVVLVNQATASASEILAGALQDNGRAMLVGEKTFGKGLIQSLFELPDGAGMAVTVAKYETPLHHDINKLGIMPDEVVPQEPIGYAMMGSETDLQYQAALDLLTQDQAIAQISQAS

SEQ ID NO: 21357 - protein, 430 aa, Cyanothece sp.
MLNKPEVPIEAIEAREILDSRGKPTVEAEVRLETGAVGMAQVPSGASTGTFEAHELRDGDPSRYGGKGVTIAVRNIHEKIAPSILDMDAFDQVSVDLKMIQRDGTPNKKELGANAILAVSLATAKAAAAELDIPLYRYLGGPLSNVLPVPMMNVLNGGAHADNNVDFQEFMIMPIGADSFREALRWGAEVFACLSSVLKERKLLSGVGDEGGYAPNLGSNQEALDLLMEAIDKAGYKAGEQIALAMDVASSEFYKDGQYIYDGSAHSPQEFIDYLDKLVSQYPIVSIEDGLAEEDWDNWKILTDQLGSRIQLVGDDLLVTNPTRLQKAIDMGVANSILIKLNQIGTLTETLETIDLATRNKYRSVISHRSGETEDTTIADLAVATRAGQIKTGSLCRSERVAKYNRLLRIEDELGDRAVYAAKIGLGPKA

SEQ ID NO: 21358 - protein, 430 aa, Cyanothece sp.
MLNKPEVLIEAITAREILDSRGRPTIEAEVLLETGAFGIAQVPSGASTGSFEAHELRDDDPARYAGKGVLTAVRNVKEKIAPQLLGTNAFDQASIDQKMIDRDGSSNKKELGANAILGVSLATAKAASAELDIPLYRYLGGPLANVLPVPMMNVLNGGSHADNNVDFQEFMIMPVGADSFTEGLRWGAEVFATLSKVLKERKLLSGVGDEGGYAPNLASNQEALDLLIEAIERSNYKPGEQIALAMDVASSEFYKDGQYVYDGSAHSPQEFIDYLAKLVSEYPIISIEDGLQEEDWDNWKLHTQSLGSRIQLVGDDLFVTNPTRLQRGIDLGVANSILIKLNQIGTLTETLETIALATRCQYTSVISHRSGETEDTTIADLAVATRAGQIKTGSLCRSERVAKYNRLLRIEEELGDRALYAPKVGLGPKF

SEQ ID NO: 21359 - protein, 430 aa, Synechococcus elongatus
MPDDYGTQIAEITAREILDSRGRPTVEAEVHLEDGSVGLAQVPSGASTGTFEAHELRDDDPSRYGGKGVQKAVENVSAIEDALIGLSALDQEGLDKAMIALDGTPNKKNLGANAILAVSLATAHAAATSLNLPLYRYLGGPLANVLPVPMMNVINGGAHADNNVDFQEFMIMPVGAPSFKEALRWGAEVFHALAKVLKDKGLATGVGDEGGFAPNLGSNKEALELLLTAIEAAGYKPGEQVALAMDVASSEFYKNGLYTCDGVSHEPAGMIGILADLVSQYPIVSIEDGLQEDDWSNWKTLTQQLGSTVQLVGDDLFVTNPDRLQSGIEQGVGNAVLIKLNQIGTLTETLRTIDLATRSGYRSVISHRSGETEDTTIADLAVATRAGQIKTGSLSRSERIAKYNRLLRIEAALGENALYAGAIGLGPKGR

SEQ ID NO: 21360 - protein, 432 aa, Synechococcus sp.
METAIEWITAHEILDSRGQPTLEALVGLANGATGLAQVPSGASTGTFEAHELRDGDPKRYGGKGVLRAVENILGPIQSELRGEDALNQARIDQLLIDLDGTPNKSQLGANAILAVSLATAKAAASAVGLPLYRYLGGPFANLLPAPLMNVLNGGAHADNNLDIQEFMIVPIGAPSFREALRYGAEVFAALKQVLRQRGLSTGVGDEGGFAPNLDSNAAALDLLMTAIEQAGYRPGEDIALALDVAANELLQDGQYHFEGKARSAEQMVNYYEQLLANYPILSLEDGLAEEDWAGWQAMTARLGSRVQLVGDDLFVTNPARLQKGIDSGAANAILIKLNQIGTLTETVSTIQLAVQAGFRTLISHRSGETEDTTIADLAVATRAGQIKTGSLCRSERIAKYNQLLRIEDELGEAAVYAGRVGLGPRGLPARSR

SEQ ID NO: 21361 - protein, 427 aa, Synechococcus sp.
METAIEWITAHEILDSRGRPTLEALVGLANGATGLAQVPSGASTGTFEAHELRDGDPKRYGGKGVLRAVENILGPIQSELQGEDALNQARIDQLLIDLDGTPNKSRLGANAILAVSLATAKAAAEAVGLPLYKYLGGPFANLLPVPLMNVLNGGAHADNNVDIQEFMLVPIGAASFREALRYGAEVFAVLKQVLQQKGLSTGVGDEGGFAPDLDSNAAALDLLMTAIEQAGYKPGADIALALDVAANELLQDGQYHFEGKAHSAADMVAYYQQLLANYPILSIEDGLAEEDWAGWQAMTAQLGSRVQLVGDDLFVTNLTRLQKGIDSAAANAILIKPNQIGTLTETVSAIQLAVQAGFRTIISHRSGETEDTTIADLAVATRAGQIKTGSLCRSERIAKYNQLLRIEDELGEAAVYAGRVGLGPRAR

SEQ ID NO: 21362 - protein, 430 aa, Synechococcus sp.
MLDKSEAIIEAIDAREILDSRGRPTVEAEVRLESGAVGLAQVPSGASTGSFEAHELRDGDKARYGGNGVLKAVRNAKEKIAPELIGKDALDQTTVDYAMIARDGSDNKSNLGANAILAVSLAAAKAAAAELALPLYRYLGGPLANVLPVPLMNVINGGAHAANNVDFQEFMIVPVGASSFKEALRWGAEVFTALSKVLDSKGLLTGVGDEGGFAPNLGSNEEALEILVDSIKAAGYEPGTQVALALDIAASEFYADGQYTYDGTAHSPAEFIDYLTAMVEKYPIVSIEDGLHEDDWDSWTILTARIGHRVQLVGDDLFVTNKVRLQQGIEKKAGNAVLIKLNQIGTLTETLETIDLATRNGYQSVISHRSGETEDTTIADLAVATRAGQIKTGSLCRSERVAKYNRLLRIEDELGDRAVYAPKVGLGPQF

SEQ ID NO: 21363 - protein, 430 aa, Synechococcus sp.; identical to SEQ ID NO: 21359

SEQ ID NO: 21364 - protein, 430 aa, Synechococcus sp.
MFDSLDLVIDTIVAREVLDSRGNPTVEAEVLLEGGASGRAIVPSGASTGAHEAHELRDGGDRYMGKGVIQAVNHIEERIAPALCGLSALDQAAVDAAMLELDGSDNKSSLGANAILAVSMANARAAANGLGLPLYRYLGGPMATLLPVPLMNVINGGAHAANSLDFQEFMLVPHGAPSFREALRMGTEVFHTLKKLLSAKGMSTAVGDEGGFAPDLGNVEAGEILVEAIEKAGYKPGEQISLALDVASTEFFADGRYAFDGGSYDSAEMVGQLEKLVEQFPIVSIEDGLAEDDWEGWKLLTERLGSKVQLVGDDLFVTNTKRLQQGIDSSTANSILIKVNQIGSLTETLQAIDLAGRSGYTSVISHRSGETEDTTIADLSVATRAGQIKTGSLSRSERVAKYNQLLRIEDELGSQAVYAGAVGQGPRGNA

SEQ ID NO: 21365 - protein, 430 aa, Synechococcus sp.
MIDSLDLVIDTIVAREVLDSRGNPTVEAEVLLEGGAMGRAIVPSGASTGAHEAHELRDGGDRYMGKGVSQAVTHIEERIAPTLCGLSALDQAAVDAAMLELDGSDNKSSLGANAILAVSMATARAAANGLGLPLYRYLGGPMANLLPVPLMNVINGGAHAANSLDFQEFMLVPHGAPSFREALRMGTEVFHTLKGLLKAKGMSTSVGDEGGFAPDLGNVEAGEILVEAITKAGYKPGEQISLALDVASTEFFENGRYAFDGGNYDSAEMVGQLEQLVEKFPIVSIEDGLAEDDWEGWKLLTERLGGKVQLVGDDLFVTNTKRLQQGIDNSTANSILIKVNQIGSLTETLQAIDLAGRSGYTSVISHRSGETEDTTIADLSVATRAGQIKTGSLSRSERVAKYNQLLRIEDELGSQAVYAGAVGQGPRGNA

SEQ ID NO: 21366 - protein, 430 aa, Synechococcus sp.
MLDSLDLVIDTIVAREVLDSRGNPTVEAEVLLEGGASGRAIVPSGASTGAHEAHELRDGGDRYMGKGVTKAVDHIEERIAPALCGLSALDQGSVDAAMLELDGSDNKSGLGANAILAVSMATARAAANGLGLPLYRYLGGPMATLLPVPLMNVINGGAHAANNLDFQEFMLVPHGAPNFREALRMGTEVFHTLKNLLSERGMSTSVGDEGGFAPDLGNEEAGEVLVQAIEKAGYKPGEQISLALDVASTEFYSDGRYAFSGGSYSSAEMVDQLEQLVNRFPIISIEDGLAEDDWEGWALLTERLGKRVQLVGDDLFVTNTKRLQRGIDANTANSILIKVNQIGSLTETLQAIDLAGRSGYTSVISHRSGETEDTTIADLAVATRAGQIKTGSLSRSERVAKYNQLLRIEDELGDQAVYAGATGQGPRGRD

SEQ ID NO: 21367 - protein, 430 aa, Synechococcus sp.
MIDSLDLVIDTIVAREVLDSRGNPTVEAEVLLEGGAMGRAIVPSGASTGAHEAHELRDGGKRYMGKGVSQAVTHIEERIAPALCGLSALDQAAVDAAMLELDGSDNKSNLGANSILAVSMATARAAANGLGLPLYRYLGGPLANLLPVPLMNVINGGAHAANSLDFQEFMLVPHGAPSFREALRMGTEVFHTLKDLLNAKGMSTSVGDEGGFAPNLGNVEAGEILVEAIQKAGYKPGEQISLALDVASTEFFENGRYAFDGGSYTSAEMVGQLEQLVNQFPIVSIEDGLAEDDWEGWKLLTERLGSKVQLVGDDLFVTNTKRLQQGIDNNTANSILIKVNQIGSLTETLQAIDLAGRSGYTSVISHRSGETEDTTIADLSVATRAGQIKTGSLSRSERVAKYNQLLRIEDELGSQAVYAGAVGQGPRGKA

SEQ ID NO: 21368 - protein, 430 aa, Synechococcus sp.
MIDSLDLVIDTIVAREVLDSRGNPTVEAEVLLEGGAMGRAIVPSGASTGAHEAHELRDGGDRYMGKGVGQAVNHIEERIATALCGLSALDQAAVDAAMLELDGSDNKSNLGANAILAVSMATARAAANGLGIPLYRYLGGPMANLLPVPLMNVINGGAHAANSLDFQEFMLVPHGAPSFREALRMGTEVFHTLKKLLSDKGMSTAVGDEGGFAPDLGNVEAGEILVEAISKAGYKPGEQISLALDVASTEFFENGRYAFDGGSYTSAEMVGQLEQLVEKFPIVSIEDGLAEDDWDGWKLLTERLGGKVQLVGDDLFVTNTKRLQQGIDSATANSILIKVNQIGSLTETLQAIDLAGRSGYTSVISHRSGETEDTTIADLSVATRAGQIKTGSLSRSERVAKYNQLLRIEDELGSQAVYAGAVGQGPRGKA

SEQ ID NO: 21369 - protein, 353 aa, Synechococcus phage
MTSSTLSQPIKQRGWFDVLDDWIKRDRFVFVGWSGLLLFPTAYLALGGWLTGTTFVTSWYTHGLASSYLEGANFLTAAVSTPADAMGHSLLLLWGPESQGDIVRWFQLGGLWTFVALHGAFSLIGFMLRQFEISRLVGIRPYNAIAFSGPIAVFVSVFLMYPLGQSSWFFAPSFGVAAIFRFLLFLQGFHNWTLNPFHMMGVAGILGGALLCAIHGATVENTLYEDGEQSNTFKAFEPTQEEETYSMVTANRYWSQIFGIAFSNKRWLHFFMLFVPVMGLWTSSIGIIGLALNLRAYDFVSQEIRAAEDPEFETFYTKNILLNEGLRAWMAPVDQPHENFVFPEEVLPRGNAL

SEQ ID NO: 21370 - protein, 351 aa, Synechococcus phage
MVASNLTLQQRGWFDVLDDWLKRDRFVFVGWSGLLLFPTAYLAIGGWLTGTTFVTSWYTHGLASSYLEGANFLTAAVSTPADAMGHSLLLLWGPEAQGDFIRWCQLGGLWAFVALHGAFALIGFMLRQFELARLIGIRPYNAIAFSGPIAVFVSVFLIYPLGQSSWFFAPSFGVAAIFRFLLFLQGFHNWTLNPFHMMGVAGILGGALLSAIHGVTVENTLYQDGEQANTFKAFDSTQEEETYSMVTANRFWSQIFGIAFSNKRWLHFFMLFVPVMGLWTSSIGIIGLALNLRAYDFVSQEIRASEDPEFETFYTKNILLNEGLRAWLAPVDQPHENFVFPEEVLPRGNAL

SEQ ID NO: 21371 - protein, 351 aa, Synechococcus phage
MTTSTLQAPTRGWFDVLDDWLKRDRFVFVGWSGLLLFPTAYLAIGGWLTGTTFVTSWYTHGLASSYLEGANFLTAAVSTPADAMGHSLLLLWGPESQGDFIRWCQLGGLWAFVALHGAFALIGFMLRQFEISRLVGIRPYNAIAFSGPIAVFVSVFLIYPLGQSSWFFAPSFGVAAIFRFLLFLQGFHNWTLNPFHMMGVAGILGGALLSAIHGVTVENTLYEDGEQANTFKAFDTTQEEETYSMVTANRFWSQIFGIAFSNKRWLHFFMLFVPVMGLWTSSIGIIGLALNLRAYDFVSQEVRAAEDPEFETFYTKNILLNEGLRAWMAPVDQPHENFVFPEEVLPRGNAL

SEQ ID NO: 21372 - protein, 351 aa, Synechococcus phage
MVASTLSPPTRGWFDVLDDWLKRDRFVFVGWSGLLLFPTAYLAIGGWLTGTTFVTSWYTHGLASSYLEGANFLTAAVSTPADSMGHSLLLLWGPESQGDFVRWLQLGGLWAFVALHGAFALIGFMLRQFELARLIGIRPYNAIAFSGPIAVFVSVFLLYPLGQSSWFFAPSFGVAAIFRFLLFLQGFHNWTLNPFHMMGVAGILGGALLSAIHGVTVENTLYEDGEQANTFKAFDSTQEEETYSMVTANRFWSQIFGIAFSNKRWLHFFMLFVPVMGLWTSSIGIIGLALNLRAYDFVSQEIRAAEDPEFETFYTKNILLNEGLRAWLAPIDQPHENFVFPEEVLPRGNAL

SEQ ID NO: 21373 - protein, 339 aa, Synechococcus elongatus
MIRIRNRWFRWLAIALASLVASIGIATVGFAATGVTPDQVLSAIEGTFGVNVGQRRNHIKGTCAVGNFVATTEAKTYSRSPLFSGQSIPVVARFSLAGGNPKAPDTAKNPRGLGLQFQLPNNRFLNMALLNTPVFGVASPEGFYENILAIRPDPTTGKPDPEKVKAFREKYPENKAQAAFLASNNPPTSYANTSYFGLHAFKFINQTNQTRLVRWQFVPQDGEKRLTDAELQAAPANFLEQKLIERTQDSPVKWDFWITLGQPGDAEDNPTIAWPSDRQQVKVGTLTLTAASPQPGAACEGINYDPLVLSDGIEPTNDPVLQFRSGVYALSYSKRTRGL

SEQ ID NO: 21374 - protein, 350 aa, Synechococcus elongatus
MKTAWTRRSFLQSAALATATVITIAACGGNNQSSSGGSGQPVEVTLVSYAVTQAAYEQIIPKFAAQWKEKTGQEVRFNQSYGGSGSQTRAVIDGLEADVVALALESDINQIEKAGLIQPGWQQRVPNNGIITNSVVALVTQEGNPKGIKDWTDLTKPGVRIVTANPKTSGGARWNFLGAWGSVTQTGGTEEQALQFTTDIYKNVPILAKDARESTDVFTKGQADVLLNYENELILAQQKGEKVDYAIPPVNINIQGPVAVVDTYTDKHGTRKVSEAFVQFLFTPEAQAEFAKVGFRPALPEGVDPQLLAPFPKIQTWFTVADLGGWAKVQPEFFGDGGWFDKVQQAVAGR

SEQ ID NO: 21375 - protein, 320 aa, Synechococcus elongatus
MSVRSLRWPRQKAFLAVISLVVAVLLAVPGWLTPATAASQATVQFVAPTWAAERLNNKQLKILDVRTNPLAYIEGHLPGAVNIADAAYRGPNGFLPVQIWDPEKLASLFGRAGVSNNDTVLVYSDGNDVLGATLVAYLLERSGVQNIAVLDGGYKGYKDAGLPVTKEYPRYQAARFAPKDNRAFRVDIKQVEQLTGKSTFVDPRPPALFSGEQQVFIRNGHIPGARNIPWPTFTEANNANESLKNPHKLKPLSELKAILEAKGVTPDKDVIVTCSTGREASLQYLVLKHLLKYPKVRIYEGSWTEYSASNLPVETGPDRV

SEQ ID NO: 21376 - protein, 578 aa, Synechococcus phage
MSLFKKTKVIGSLGISPTITNKTIFSDVEPTERENGGDLRSGDRWVNTLDSTESVWSEDILPDGAWILISSNSTETGPQGFQGDQGPQGVAGSNGTQGPQGFQGADGINGTQGPQGFQGANGIDGTQGPQGNAGSNGTQGPQGFQGVGGNNGSQGPQGFQGNQGLRGFQGFQGDIGAQGSRGFQGDQGPQGFTGLQGSQGAQGSQGLRGFQGFQGNQGDSGTQGPRGFQGFQGDTGPQGVTGVGTQGPRGFQGFQGDTGPQGTQGVAGNTGTQGPQGFQGNQGVAGSNGTQGPQGFQGNQGVAGSNGTQGPQGFQGNQGVAGSNGTQGPQGFQGNAGSNGTPGPQGFQGVAGSNGTQGPQGFQGNAGSNGTQGPQGFQGNAGSQGPQGFQGNAGSNGTQGPQGFQGVAGSNGTQGPQGFQGNAGSNGTQGPQGFQGNQGATGSGTQGPQGAPGVGTPGPQGFQGPQGPQGGGGGSGYVYTYSDTEPTSPNPGDEWTDSSDPKLPTYRYIDDGNTAQWVELVVSGQAGPQGDQGDPGIFTGTPSFIQSTQPTLLELNGNDKYIWWDTSNGLTLWIEDGT

SEQ ID NO: 21377 - protein, 376 aa, Synechococcus phage
MFDFPLSPVLNQVYTEGDRSWTWNGKSWVAIVSIGDQGEPGVQGPQGFQGNQGSQGIAGSNGTQGPQGFQGVAGSNGTQGPQGFQGNQGSQGIAGSNGTQGPQGFQGVAGSNGTQGPQGFQGSQGIAGSNGTQGPQGFQGVAGSNGTQGPQGFQGNQGTQGIAGTQGPQGFQGFQGSSGASGYTYSPTAPSSPNVGDEWTNSDDPRLPTYRYINDGNTTQWVELNASGESGPQGTQGVQGVQGTQGAQGPQGVPGSVMRLCIAASDESTALTTGNNRVRFRMPRAMTVTEVRATVNTAPTGSTLIVDINEGDTPVSILSTKISIDATEFSSVTAAVPPVISDTSLANDALISIDIDQIGATVPGAGLKVWIIGVEA

SEQ ID NO: 21378 - protein, 236 aa, Synechococcus phage
MALNFPANPTPNQIYFDVSNGYRYQWVVDPQSLTGQGKWTVRTSGFNNNPAGAQGPQGFQGDPGGPQGPQGFQGPPGTGAQGPQGVPGAQGPQGDAGGPQGDPGEQGPQGEPGATTSPLIPLGITCSDETTPITTGTDKFTFTVPLNGTIDSIIASSIVAPDGSDIIIDVNKNGSSILTTEIHIDDGDVSSIGSATPYVISDDALVAGDVISVDFDQVGSTTEGTGVKLWFIIQYS

SEQ ID NO: 21379 - protein, 1477 aa, Synechococcus phage
MAEFRLGRVKFNWTGDWTTSKAYLIDDIAKFGGNTYVAIENHTSTASVSDFYANDLSKWNIHIEGLEQKGQWATGVYYRINDLVKFGNVVYRVTTAHTSEGTFIDKTKVTEYVKGFQNEGEWDGNVEYQSGDVVNYNGSSYVALTTSLAGFQPPQYLGVSTDPNAKWTILSDGLAGAASTYIEGTYYRGDLIQYGGNIYRHKLGITTNVSPLQVGLGSIQPQSFTGTEVWDLLVKGFDFKGGFSTTFNYHPGHVARYGSDSYISIGSSHKNVIPTAGIGTFWEVLASGDSSAALNTKGDLLSYNSGNVRIGIGSTGYALAVQSNGMPGYEIVGNQTRIYYVDSEDGLDVNNGLAPNLAFKTIKKACEAARPKTNITNMVYTASTGVATVTAPGHGLLNTGTFVQLQDIQFECLSGGNVFNVLGMTYNKAVGLATITAIGLGAAPEVGIGATVRIRNLSVQYQGSAQFAHTFQTATEDAIQSGGDYVHTFNSCAPNGVTVVGGSSITPTSATYDPSNGNFTMTITGHSLSTSDSVTIADNAFTFTCTMNNNASQKTYPRPGKDPAQGQQLAITGTTTDTITVNVGPSPIVNHQPTAVSYNQATGDMVCTIGPHTLTVGTSVKLATDGMVFRCSMDGYTTDHSYPRQVAGDGNPDPAYNTALNITAVTTNTITINVGTASDDQTITGKFPAVHTQGTYEFLVQAVPDSNSITLNVGVSTTDYLYVSGGTAFVGLTTTKYPDKVAKSYYEVLEVTDVDNFKCNVGISTIDHTYVEGGLVTDLTPAILKLSASQFYEQLPVTVPPFTSIVGNALRGSQVLPKAGTSDDSSTPNNRSHMFKMSDATTIQAISMKGMEGFYYDPNAPLELDNSNLRTGIGTTAAGVFISLNPDSPIDNKSPYVKDCTCFSDPATESGRFGGGGVGVFIDGGVHDTGAKSMVFDAFTHVASDGAGYILDKGAIAEIVSCFTYYAKWGYYSGGGSRIRGVGGNNSYGDYGVISSGFSTDEVPRTAKVFGDMMTVQGTTKGGTVSIGATMFGQTSKATAWMLNDQISADKIYFKYQSGYGNAGIGTTGFVDGEIVWFGNGAENSSGVGSITVGAAASSTTGQKGTILEVDQTSGTLLIGDAIGFQTTAYGADDRFYIINTITNVAAAATYYEWQAGNGASQQVVFNNRATLTISPEKSRGTWDTRNSGSTSDIEIRTLFSQARLTGHDFLAVGTGNKTQTGYPNVNLANVIQGQETNVFGPGKVFFVSTDQGGNFRVGDFFSVDQLTGRATLDASAFNLSGLTELRLGAIGGQVGEAINEFSSDETLAGNSNTACPTEFAVKGFLTRGSMGIKAMTPPVGTTAQRPGGVDDEFNTGALRFNTTLGALEYYNGTTWIQPGVKTYSTVSSSFSATSGVTYFVNTGGGQVTATLPASPDLGAEITFMDVAKTFDSNNLVVSRNGRPIQGDNANLTVSTEGAAFTLVYSGSTYGWRIFSI

SEQ ID NO: 21380 - protein, 302 aa, Synechococcus phage
MMASASLPVTFVGVDGVDGAVGPQGPEGPQGLQGDTGPQGPQGLQGEQGLQGPQGLPGADGADGAQGPQGIQGEQGLQGPQGLPGADGADSTVPGPQGPKGDKGDTGDAGPQGPKGDTGDAGPQGLKGDPGNDGADGATGPEGPQGPQGNPGADGADGAQGPKGDKGDTGDPGAQGPQGNPGDQGPQGNPGADGADGAIGPEGPQGPQGPEGPEGPMSTAALTVDINSDIASASRAIIYAPGSNGQASLKYNGSFLINPLNGTLTAPTFIGDLTGDVSVATISYLGFEHRCYSHRQPHNDCW

SEQ ID NO: 21381 - protein, 372 aa, Synechococcus phage
MANLIKLRRSAVQGNIPTTAQIALGELALNTYDGKLYAKKSVGGVESIVELSGGGGGGGTTGTPLRYLHVDGTTTQNLSTTEVTLDFDTTITSSGAGDFTVGSGGEITVLNNGTYYVEYSATGDQTSGNNRVIVFAHLEVNGTVVTGSQASVYSRNIADGAFSAVGSSVVNLNANDVIRVRASSDINSIIATIDNSISGLSIFSLSGSGPQGEQGIQGPQGIQGEPGIQGEQGIQGPQGIQGEPGIQGEQGIQGEQGIQGETGPAGPTGPAGPSDIPQNAKTTSYTLISSDNGKHISITTGGVTVPSGVFSSGNVISVYNNSSTAQTVTQGTGVTLRTGGTATTGNVTLSQRGLCTILCVSSNEFVVTGHIS

SEQ ID NO: 21382 - protein, 839 aa, Synechococcus sp.
MTMPVLASGQVDGISQSEAISDLSERETWLVQTDLPTDSAASTDSIEAPTEVSEITDIQISAAETGITLTVVSLNPLSVENTQVSGNALIITLPEATLNLSDAAAADQFAPAEGIALVQTTARADNSIQIAITGTDAPPDVQVGVVGENLVLSVVPGMAPSANAEDAIQLTVIGDQDEGYSPNSASVGTRTDTLLLDVPASIQVIPEAVIADQGALDLLDVLRNTPGINTNSSPRDIFSDFTIRGFNTGNTFLRNGVADNDLGRTGLDLSNVERVEVLRGPASVLYGQIAPGGAVNVVTKKPLSVPFYDVEVTYGSFDTYQGAVDLSGPLTEDGSVAYRLNASAYSTDTFIDEIGLERYFVAPVLSWDISDDTNLIFEAEYIDARYPNERGLPIEGTILPNPNGELPRSRYLGEPSFDRNDRTTLRLGYELEHRFGEDWRLQNTFRFSWEEDYQDSVGPGSLEADFRTQPRTAFITSPGAGYSFAQNSYEATLAAIGEFKALGAEHELIMGVDFAYEVGISPFYLQQEIGSIDIFNPVYNQPLGEITDVFDPSRDTATSIGGYVQDQITLSDEFILLLGGRVDYVNQSSLDVLNDDRSSQSDTAFSPRVGLVYQPTEDVSVYGSFGRSFEQAAGRSLDGELFDPSRGTQYEIGAKANWLNDRLSTTLSLYNLTRTNVLTTDPRNVDFEVQTGEQRSRGIELNVAGEILPGWEVIAGYAYTDAEVTEDNDIPVGNQLINVAENTANVWTRYTLQSGDFEGLGFGLGLFYVGSRPGDRENTFDVPSYLRTDAAVYYNRDSFRAQLNFKNLFDTRYFESANGRDRIFPGSPFEVLATVGWEF

SEQ ID NO: 21383 - protein, 589 aa, Synechococcus sp.
MTYGQLTPTTSNTATGERNIDSLISAKRYLHESKQSSGGMGGDPEQPPYGGDEPPIGGGEPPIDPIDPPDESDEPVGIKTRITYSFPDEFRDKDYESDYGGFDGFNAFNSAQKAATRSIMKMYESVANFDLDELTDNKDRDATIRLANADGTNRFDGIAGFPSEPDFMQGDVWIDSVNDPRNTNPKIGNKGYWVLMHEIGHALGLTHSHETHANLDGPMDSWLDSKEFTVMSYKAHVGGELIPNPVDEVDQPQSLMMYDIAAIQAMYGANFDTRSGNTTYTFSTSTGEMFANGQSLGKPENNTIFRTIWDGNGRDTYDFSNTGRSQSINLRPGAWSDLSADSTAQNARLKIEWGGVVTKRARGHIANALQHNDDPRSLIENAKGGGGSDTIQGNIARNHLYGNVGDDRLWGWDNNDTLDGGSEDDLLFGGRHNDILKGGPGNDILVGADPYSNTPHNEVDVLWGGADADRFVLGLASDYSVPTVGGPPANRILYDDNVVWTEGQNSYALIMDFELGIDRIQLRGDSRDYNWRSVEVVHDNQTYLGTGIYVDNPVPHRDELIGVLVGVNASQISVYDSSQFSYVYATTEF

SEQ ID NO: 21384 - protein, 702 aa, Synechococcus sp.
MLGGALAVLTGPLIVAQSAIGATIVEGIALKRTAAGLELKLETRGDSPQVVTASLGEILQADIAHAQLKLPEGESFTRKNPAPGIASVKLEAIAPERVRVTVLSKTKAPVSQIQKSTDDDFVLALDTRSHAKAAPSNLPKSLITVPGKANSAEASLSEASLNEATLTEAIPIEAEGSSASTFELAQAIEDEAAPEILVPNPEVMIDGTPITTPTLNGAPPLLPRAIAPPVGDLSVSDIDSTLDEIDLGTTERVPRLVLRDASAREVLALLARATGLNLAFSNEGEGEEAFDALVSLDIENESVQNVFNYVLQLSGLDANKVGQTIFVGPRLPNSARNVLVRSIRLNQIDVSNAVNFLVSMGAESAVNSESSVTSVSAVEVGEGTDVTESTVTQSSLTNQRIDFADADPLLRGLQVIGDERTNSLTLIGTPRQIEIATAQMVQLDIRRRQVAVNLRVIDVNLNDSDSFGSQFSFGLGDTAITQSGGIGLINFGVAGGALGIARQFLAQLEASVQSSNAKIVTDPTLVIQEGQTAAVQLTQEVVTNITTDIETTEVGVLRTVTFEKEDAGLNLQVQIDRIDDNGFVTLAVAPSISAPTDTFNIGTEEAVLLANRQLTSGQIRVRDGQTLVLSGIIQESDRNTVTKVPILGDIPLLGALFRNSDRENIRRELIVLLTPQVMNDSDQSVYGYGYVPSEDVQQLLER

SEQ ID NO: 21385 - protein, 658 aa, Synechococcus sp.
MNSFLTLLVNEIVGSLFKDAPTIDDLGDIFIGGNGDDNLQGGDRDDIFLTSGGDDTVLGGDGTDVVFAGNGNDIVIGQTGDDVAFLGSGDDRFIWNNGDGSDFIKGGAGFDITEVNGADGAGDEFDLRAVDGQAIFNRLNLGLFTLTNEKIEQFEINGQGGDDSLTVGDLSGSGVKKVVFSGGKGNDVLDARESSTTLKAFGGKGDDLLQGGSAEDTFLAGGGDDLVVGQRGDDTAYLQGGDDRFIWNNGDGSDFINGGRGFDITEVNGADGAGDEFDLRQVGRQTIFNRLNLRLFTLTNNKIEQFEINGQGGDDSLTVDDLSSKVQKVIFSGGDGNDVLDARESSTTLEAFGGEGDDLLQGGSAEDTFFAGGGDDIVVGQRGDDTAYLEDGDDRFIWNNGDGSDFINGGADFDVTQVNGADVAGDEFDLRAVDGQAIFNRFNLGLFTLTNEEVEQFEINGQGGDDSFTVGDLTGGGVQSVLFSGGDGNDFLNGSGTATPITADGGAGDDILIGGDGDDILIGGDGADLLIGAGGNDILIGGGGSDLFGFDTGAAFNAADIGTNMIQNFESTDSIVLDATIFTALTSKIGGGLSASEFAVVDSVEAAAVSDALIVYGANTGHLYYNSNGADAEFGGGAQFATIEGAPTLDANSFVVQA

SEQ ID NO: 21386 - protein, 429 aa, Synechococcus sp.
MIDSLDTAIEAIQAREILDSRGRPTIEAEIYLSGGAFGIAQVPSGASTGSFEAHELRDGDKSRYGGKGVIQAVENVNDAIARELMGANALNQIEIDRMMIALDDTSNKKKLGANAILAVSLATAHAAAAAQAMPLYRYIGGPLANVLPIPMMNVINGGEHASNNVDIQEFMIMPVGASSFREALRWGAEIFAQLSKVLDAKGLLTGVGDEGGFAPNLSSNQEALDLLMSAISEAGYTPGEQVALALDVAASELYENGEYTYDGAAHSPVEMISYLESLASNYPIVSIEDGLHEDDWESWETLTERIGSKVQLVGDDLFVTNPTRLQKGIDQASANALLVKLNQIGTLTETLEAIDLAKRNQFNCVISHRSGETEDTTIADLAVATRAGQIKTGSLCRSERVAKYNQLLRIEDELGDQAVYAGTTGMGPR

SEQ ID NO: 21387 - protein, 838 aa, Synechococcus sp.
MSVVNPFAQSASVLDGAQEVAAGDSNAAGVDTLILGSNGESLSYELTVSGLDFGAFFSDGKPQTEDTGDDVIGLHIHSGSRGENGPIAFGLIDIGLVDRQFDGQDVDDITFSLNSDGSTTIRGVWDETDPASIALSQFVDDIQNAAPGEDIPLYWNVHTNDFRGGAIRGQFLGENAPIVGTAAAEELQGTEGNDILDGLGGGDTLVGLGGNDVLLGGGGADINDGGEGIDTANFSDIGAPVTALLGQGLASYVPASGVTVIDTLISIENLSGTENDDQLFGDRGTNVIDGGGGNDLVAGGGGDDVLQGNEGDDVLRGGGGNDTLNGGNGNDTADFSDIGFEVTANLAQSSANYVVASGANVVDSLSNIENLSGSSNDDHLTGDDASNLIAGAAGDDTLLGGDGDDVLRGDEIGDGTALVFTVENLQTNGGTFYTPLWLGVHDGTFDLYDRGGPARQGLERLAEDGTIAPISAEFVAEQLAVGGVDGTIFGGQGVPGPIDPGETAQIVLDVDDPSVARFFTWGTMVIPSNDAFLATTGNPLGEPIFDADGNFLGPITIERTGNDVLDAGTEVNTEEGAAFLNQTAPDEGTPENGVVIAHPGFNGSERNPDGTPVNILGGLTAPGAMIDPVVGDFTQNGGEDLLLRITIDELAAQGGNDVIDGGLGDDLIEGGAGSDLLAGGLGDDVLFGGKGDDTLRGDLNNRNPQVGVGGNDVLRGGAGNDAIGGKGGNDQLFGDDGDDLLFGDDGDDILTGGAGNDRLQGDDFSGGSGADTFVIEAGAGTDTIVDFQLGTDLIGLGAGLSFAQLSLRGNSILFGDETLATLSGIQTASLAESSFITI

SEQ ID NO: 21388 - protein, 906 aa, Synechococcus sp.
MTATRMRWGGWLVQLMAGCGLLLGPAAIASESVLKENASAMDMTVSDAKPDEASTPTVTTDRWLRERWLTQSDLAEPAAEVVEITDIQLEETAAGIALQLETTGELITPELSVAGNAAILDIPNAILNLPEAERFAISAPNADIAFIDINNRPDNQVRIAITGTEAPPTLSVTTVATMLTVRAIARASTAQDSMPDPMPEPMPDPSEDAIAGDPVPGSSGSDDAIQIIVTGGQVQDNYFVPNASSATRTDTPILETPASVQVIPRQVLEDQQVRDLGDALRNLSGASVNSTEGRGFQISLRGFNGVSVYRDGFRLYSPNDNGDAAGQGFPEIANIERIEVLRGPASVLFGQSEPGGILNIVSKAPLEQPFYEIGLQTDSRGSVRPQIDISGPLTEDNRLLYRLNAVYQNENEFQDFDERSERFFVAPDLAWRINDRTDLNLQLEYLNDDRPFNPGLVALGDEVADIPRDRILGEPDDSISSEFSNVGYDLEHRFSDTWKIRNAFRYLNQSDDISATLSFPFIGGLDEATGDLNRVFAEQDVNNKTLALQTNVVGEFSTGPVDHTLLVGVDLARYSLDSDSFTDFSPGPSRTPINIFDPVYGTPPRPERGDVPTRSDRIDTNSLQIYAQDQIDLLDNLILVAGFSYETVEQTTVTTSRGVTTEVDLTEDAFSPRIGLVYQPIENLSLYANYSRSFFPSAAVTVDGEPLAAEEGEGFEVGLKTELFEGNLLATLAYFNLTKQNVATTDLNDPRFSVATGEQQSQGIELDVIGEISPAWNVVASYAYIDSALTEDSSIETGNPLPGVPEHSASLWTNYEIQSGDLTGLGFGLGLNWVGERQGDLSNSFDLDSYFLTNAAVSYERNRWKFGLNFQNLFDVSFIEGTPRTRTRGIEPGDPFTVLGSVSYEF

SEQ ID NO: 21389 - protein, 823 aa, Synechococcus sp.
MTTVLSLFALTATGAKAEIADSRIGEASYTVTANWMAQTETAPVQIVGIQVEESETGLQITLETIETALNMRVTTASGNALIAEFSNAVLVDNPLEQFEPAEGIALVQVSALPDERVRVVVTGSNAPPIADFESTASGLAISIAPGAAQADDTSDTIRLVVTGEDDEGYNPSSASTAIGTDTPIRDTPFSIQVIPEAVLEDRNVTELGDALETAGGIVENGARGTSAFGPNLLIRGFRLNDTIFRDGISAFSLAPLSTNDVERIEVLRGPASVLFGQGNPGGVVNLVTKQPLSKPFHEVSGSAGSFESYDGALDLSGPLTGAGDVRYRLNLSYENYGSFRDFVDGERLQVSPTLAWDINENTSLDVFGQYTYDRETTDEGIPFDSNGEPIDVPRSRFLNEDFGEFTQDQFSLGYRLNHDFNDNLSLRHSSQYFQYEPERYYPFVNSFDEVTGEAERVEYFAEGTYQRFFTNAELVGQFNTGSVEHELLFGLEYRHDAEDPAFQFDNEFPPINAFNPVYTNEPFEKSPTFFRDDNVDTISAYIQDQITIIPELILLAGLRFDYVDEFRTERNSGEPRQEFEDQSEAFTPRLGIVYKPIEPITLYASYTTSFLPNGAGFLNGNGSTFEPEEGRQFEVGIKTDVTDRLSLTLAAFDIRRQNIVVSDPDDPLLSIQTGEVASRGIDLNLNGEILPGWNVTAAYNYLDAFVSEDTTDIQGNQLEGVPDNQFSLWTTYEIQQGNLAGLGAGLGLLYVGDRPGDIDNSFTLPDYFRTDAALFYKRDNWRAQLNVENLFDIDYFPSTSYGSSLYVNPGAPFGISASFAVEF

SEQ ID NO: 21390 - protein, 1041 aa, Synechococcus sp.
MDNIFTLPSAKSLSHDEPSQTESSDDACGCEVVDGQTVNTTWLDGDGPNALENLEQRGLLEEPAASRIKLPEYDGSGVFDIYVEAGLLSGIEEAVDTYVDDLEGEGYQISVQEFSGDAEALKTRLQSSWQEKGLEGTLFIGDLPHVEFTSEDNFNASGRQVTYPHDLYFMDLDGDYDLNDVGLDGHTGEVSPEIYVSRLTTGNLSGITGQTETDLINDYFARNHAYRTGELTFRNRGIVFADDDWSHWGADRMQALYEEVLVLNNASETTKDNYLNTLGLNYESILEAIHSSPTSHSLKVNDRWERISSQEIVETNPRVGFYNLFNCSSADFTVPNNLIGAYVYGGEFGLNAIGSTKTGSMLNFFDFYQPQGENDSVGQAFLQWFDQYAASTDNPSQDWRLDWFNGMTMQGDPTLKPASMGDAPGELIGTKWNDLNGDGIRQAEEPGLAGWVIYLDQNQNSQLDENEASTVTDSDGNYRFSALLPGTYTVTEQPQPDWSQTKPIGFDYDWSDSDSTELPFDWVEISEVGTALTLGDDEGIQIDLPFEFPFYGETQKTVKISSNGYLSFGEDAFQFDNESIPQPTQPNQIIAPFWDDLNPTQGGNVYYHYDADNDCFIVQYDEVPHYSDEGAYTFQAILNADGTILYQYDTLTGILDSATVGIENKDGTDGVQIAFDQSYLHDDLAIALNPVPNSPQPYTVSVVSGETITDLDFGNQQRALNIINGTSGDDTLFGGKRDDILFGLAGNDFLDGGNGDDTLDGGRGNDTLFGGNGNDILIGGADNDTLDGGKGNDTLDGGRGNDLLTGGRGSDSLLGSDGNDTLFGGGDNDTLDGGKGNDTLNGDKGNDTLDGGRGSDALFGNDGNDILSGGADNDTLDGGKGNDTLDGGRGNDLLNGGRGLDVLFGNDGNDILSGGADNDTLNGGNGNDTLNGGKGNDTLDGGKGRDLLLGNDGNDTLIGGGNNDTLTGGNGRDTFVLSLGDGFDTITDFDTKDLIGLAGGLSLGALSFVGNDIFVTDTSEMLATLTGIDTSSLNSSQFVLV

SEQ ID NO: 21391 - protein, 430 aa, Synechococcus sp.
MLDSLDLVIDTIVAREVLDSRGNPTVEAEVLLEGGASGRAIVPSGASTGAHEAHELRDGGSRYMGKGVTKAVDHIEDRIAPALCGLSALDQAAVDSTMQELDGSENKSNLGANSILAVSMATARAAANGVGLPLYRYLGGPMASLLPVPLMNVINGGAHAANSLDFQEFMLVPHGAPTFREALRMGTEVFHTLKGLLHDRGLSTSVGDEGGFAPDLGNIEAGDVLVQAIEKAGYKPGEQISLALDVASTEFFKDGRYAFDGGSFDSAEMVGQLEQLVNRFPIVSIEDGLAEDDWSGWKLLTERLGSKVQLVGDDLFVTNSKRLQQGIDQGVANSILIKVNQIGSLTETLQAIDLAGRSGYTSVISHRSGETEDTTIADLSVATRAGQIKTGSLSRSERVAKYNQLLRIEDELGSQAVYAGAAGQGPRGNG

SEQ ID NO: 21392 - protein, 430 aa, Synechococcus sp.
MFDSLDLVIDTIVAREVLDSRGNPTVEAEVLLEGGASGRAIVPSGASTGAHEAHELRDGGSRYMGKGVTQAVDHIEERIAPALCGLSALDQASVDAAMQELDGSANKSALGANAILAVSLATARAAANGVGLPLYRYLGGPMASLLPVPLMNVINGGAHAANSLDFQEFMLVPHGAPSFREALRMGTEVFHTLKGLLQERGLSTSVGDEGGFAPDLGNHEAGDILVQAIEKAGYKPGEQIALALDVASTEFYADGRYAFGGGSFSSAEMVDQLEALVNRFPIVSIEDGLAEDDWDGWKLLTERLGSRVQLVGDDLFVTNSQRLQQGIDHNTANSILIKVNQIGSLTETLQAIDLAGRSGYTSVISHRSGETEDTTIADLAVATRAGQIKTGSLSRSERVAKYNQLLRIEDELGSQAVYAGAVGQGPRGRG

SEQ ID NO: 21393 - protein, 771 aa, Synechococcus sp.
MLSSCLGGTALLGAFGLYELAAAPVLAEADGVMQLQARRSAEGLEIVVVGVGAQPVLQQRLESGQWQGRLTTQGTPGVRGGVSRLSLPDLGIQRFSLEGSGSTYLLRFDAVNGVTPPDPLVSADGRNLILSFPGLASPTLQTGRLDLNTPGRVPQARYAPPLRPRAVAPPLGDMAVGTMVLQNRSFVNVSGPPVTLTLNNAPAKDALLSIARLGGYGFVFVGEDLPGTTTTPGVPGTTPPSGQGLGGLIPVTMSFQNENYARALNGILLASGLQGKLDGRTLLVGTSVSAKTFGPQVSKVYRLNQASATSAADYLASLGASMSKVNTTSIITGEPASAGTSQLSTQTSQTRSTLTNVETYGSSVGPLRGLTGTTDARLQTVTLVGDSQLVAIAESYLKQIDLRQRQVALTVKILDINLENDKQIANSFAFRSGNMFVVSNNGELLANFGSYKPPGSEAGGLPGQYSAQEGTTPVPGTGSLAGDNTPFFDQPTSAYPLPGSSTRLGDTTRSPTRPDFGTYNNPLQPGVSDVTEDTVEYTAPTKFQYPTNQFFDFLRAKIESSSTKVLASPTLVLQEGGEKSMGTDKGKISEDGKIGREYSNEAYVRVGTQFVTSYEVKQDINGNNFCQPVFANAGLTFGARVDKIDDNGFITFALSPEISAPVGSEQVGNCGAITIINDRSLDTGKIRVRDGQTLILTGVINDTDREVVSKWPILGDLPFVGQFFRSSGGQRSKSELVILVTPRIIDDRSGGSYGYGYRPNLPAARQIMTGN

SEQ ID NO: 21394 - protein, 430 aa, Synechococcus sp.
MFDSLDLVIDTIVAREVLDSRGNPTVEAEVLLEGGASGRAIVPSGASTGAHEAHELRDGGDRYMGKGVIQAVNHIEERIAPALCGLSALDQAAVDAAMLELDGSDNKSSLGANAILAVSMANARAAANGLGLPLYRYLGGPMATLLPVPLMNVINGGAHAANSLDFQEFMLVPHGAPSFREALRMGTEVFHTLKGLLNDKGMSTSVGDEGGFAPDLGNVEAGEILVEAIEKAGYKPGEQISLALDVASTEFFADGRYAFDGGSFNSEEMVGQLEQLVEKFPIVSIEDGLAEDDWEGWKLLTERLGAKVQLVGDDLFVTNTKRLQQGIDSSTANSILIKVNQIGSLTETLQAIDLAGRSGYTSVISHRSGETEDTTIADLSVATRAGQIKTGSLSRSERVAKYNQLLRIEDELGSQAVYAGAVGQGPRGKA

SEQ ID NO: 21395 - protein, 765 aa, Synechococcus sp.
MRFSPSRLTALVLMAGLSAADVGGLDGLMKNVSRQVQAQGALALRIRRGPSGVEVVVEGVGAQPVLQQRLNGGVWEGRLQTQGQPGVRNGGQQLADPGASLAKVAISGSGQTYQLEVVPVPGQTLQEPVVSADGRNLILQFNGLTTAPTLQTGRLDLNTPGSVPQARYAPPLRPRAVAPPLGDMAVGTMVLQNRSFVNVSGPPVTLTLNNAPAKDALMALARLGGYGFVYVGDNSAASGSEEPSSVAPVSMAFQNESYARALNGVLLASGLQGKLDGRTLLVGKSAASKTFGPQISKVIRLNQVKAQSAAQYLGNLGATYNRANSITTTRGEPASVGTAQLSNSTSQQSSTTLLSESFGSSSGPLRGLVVTIDLRLQTVTLVGDSQLVAVAEGYLKQIDLRQRQVALSVRILDIALDNDSQISNSFAFRSGNAFIVSDQGQLLANFGAFKPPSSPQGGLPGQFGAAEGTTPLSGTGALREENAFLDQPQAPFPFPGSPTVPGGTFRPGFGTNQNPLQPGVSEVDEEGKITFESPTRFQYPANQFFDFLRAQIQSSSTKVLASPTLIIQEGDDESLGSDDRSISSDGKVGRSRSNEALVSVGTRLVTSYRVRQDDNANIFCEPVFKNAGLTFGARVDRIDDNGFVTFSLSPEVSAETGIRVIENCGNISLINSRELDTGKIRVRDGQTLVLTGVIQDSDVQAVTKWPILGDIPFIGQFFRSSGGSRTKRELVILVTPRIIDDTQGGNYGYGYRPSLPAARQVMSGS

SEQ ID NO: 21396 - protein, 285 aa, Synechococcus sp.
MQELNLDSSLSFNNFINLGVFQNNQLSRVVIPEGIEVIKGGAFSGNSLTSAEFPDSLVRIEGGAFQDNNFTTVVVPDNTSLSGFAFDLDVEIFRESFAPATVVKDVNYTLQSNEDNLILTGVEPLRGNGNEFINIIEGNAGNNKLRGFFAPDILKGNDGRDKIKGDEGADTLIGGVGGDILTGGSGSDSFVYETITDSGVTRKTRDKITDFQVGEDLIDLSQIDANPNLFGDQAFEFIGAAKFSEAGQARFKNGLLRLNVDDDRRAEFQVKLKGVTELFVDSLIL

SEQ ID NO: 21397 - protein, 430 aa, Synechococcus sp.
MIDSLDLVIDTIVAREVLDSRGNPTVEAEVLLEGGAMGRAIVPSGASTGAHEAHELRDGGTRYMGKGVSQAVTHIEERIAPALCGLSALDQAAVDAAMLELDGSDNKSNLGANSILAVSMATARAAANGLGLPLYRYLGGPLANLLPVPLMNVINGGAHAANSLDFQEFMLVPHGAPSFREALRMGTEVFHTLKGLLSAKGMSTAVGDEGGFAPDLGNVEAGEILVEAISKAGYKPGEEISLALDVASSEFFKDGRYAFDGGSYTSAEMVDQLERLVEKFPIVSIEDGLDEDDWEGWKLLTERLGSKVQLVGDDLFVTNTKRLQQGIDNNTANSILIKVNQIGSLTETLQAIDLAGRSGYTSVISHRSGETEDTTIADLSVATRAGQIKTGSLSRSERVAKYNQLLRIEDELGSQAVYAGAVGQGPRGKA

SEQ ID NO: 21398 - protein, 911 aa, Synechococcus sp.
MDALMGSAGLGFRAGLWLGASSTLLAILSLAVTPAPALAQAAIRSDGLQLKLRRLPDALELLIQDVGTGSDLRQQMQGQVWLGELRTPQIRGLKAGPQSLSMTDAGVDSITFDGTGTEFQLKVTPMPGRNLGTPVVSSDGRDLTVRFIAPQLPVSQTAQVDLRAPTRVPTSSFVPPLRPRAVAPPSGDIAVGTMTIRNRGYLSLYGPPVTLTTRSANPRDVLMVLSQMGGYGFAFSDASMSGGSNGQGGMRPAPPAQVTVAFQNEPYERAFNFVLLSSGLQARKEGNTILVGSDVLGKTIGPQMSKVYRLNQVAPNSAADYLANLGAQVTKTSSITTAVSQGVPLGAQPAGTGLTATSQSTTSTQQTVEAFGASSGPLVGLRATTDPRLGTITIVGEPSLVAIGEQYLKQLDLRQRQVALSVKILDVSLTNDTEIDNSFAFRFGNNFIVNDGGRLLAAFGRNLPANAQDFSDANTREFFGSSSNSSRNSSSSASNNSASGSTSNNQSGSTSGSGSDTSYSEDLTLSLANGRSLEQSQISNVNRQLFRETGTEIQPFEVTRFIPNPNAGVEGELPNIEVTDTEYRIVPIGRTTRAITDDLTSRISQIVTSQVNSGVNIARSRGGFTNSGSSSSSASGSTGSNNSSSGSNSFSDSSSDSFQNYSGSRRRNPGLNYPDNEFFSFLQAQIVSENAKVLASPTLILSENPEQIFGGAEVGGGGLGGQAGDSSGLSPATIGRTRANESFVTVGRQVVSAYDVTTTANVGVSCEPTFSTAGLTFGARVSKIDDNGFVTFTLSPAISGVVDRQPVPGCGFIDILRLRRLDTGSVRVRDGQTLILTGVISDDDFQVVSKWPILGDLPLLGQFFRKTSGSRNKNELVILVTPRIIDDEQGGTYGYGYTPSARDARRLIYSP

SEQ ID NO: 21399 - protein, 431 aa, Synechococcus sp.
MFDSLDLVIDSIVAREVLDSRGTPTVEAEVRLEGGAQGHAIVPSGASTGAHEAHELRDGGSRYAGKGVLQAVANIEEKIAPVLCGLTAIEQVAVDTTMIELDGSDNKSALGANAILAVSLAVARAAADGVGLPLYRYLGGPMATLLPVPLMNVINGGAHAANNLDFQEFMLVPHGAPSFREALRMGTEVFHVLKGLLSDQGLSTAVGDEGGFAPNLESNDAAGALLVAAIEKAGYKPGEEISLALDVASTEFYADGRYAFGGGSYSSAEMVDQLDALVSRYPIVSIEDGLAEDDWEGWALMTERMGSRLQLVGDDLFVTNTSRLQRGIDAGTANSILIKVNQIGSLTETLQAIDLAGRAGYTSVISHRSGETEDTTIADLAVATRAGQIKTGSLSRSERVAKYNRLLRIEDELGSQALYAGAEGRGPQGKL

SEQ ID NO: 21400 - protein, 430 aa, Synechococcus sp.
MIDSLDLVIDTIVSREVLDSRGNPTVEAEVLLEGGAMGRAIVPSGASTGAHEAHELRDGGDRYMGKGVGQAVNHIEERIAPALCGLSALDQAAVDAAMLELDGSDNKSNLGANAILAVSMATARAAANGLGIPLYRYLGGPMANLLPVPLMNVINGGAHAANSLDFQEFMLVPHGAPSFREALRMGTEVFHTLKKLLSDKGMSTAVGDEGGFAPDLGNVEAGEILVEAISKAGYKPGEQISLALDVASTEFFENGRYAFDGGSYTSAEMVGQLEQLVEKFPIVSIEDGLAEDDWDGWKLLTERLGGKVQLVGDDLFVTNTKRLQQGIDSATANSILIKVNQIGSLTETLQAIDLAGRSGYTSVISHRSGETEDTTIADLSVATRAGQIKTGSLSRSERVAKYNQLLRIEDELGSQAVYAGAVGQGPRGKA

SEQ ID NO: 21401 - protein, 843 aa, Synechococcus sp.
MNVPELLSPAGDWAAMKAAAASGADAVYFGVDAFNARQRAENFRLQDLPEVMQWLHQRGLKGFLTFNVLVFSDELEAAAQLLIAADRAGVDAVIVQDVGLCRLAQRLVPNLCVHGSTQMSITSAAGITQAAALGCQRVVLARELALRDLERLQTQLIQRNLAMPLEVFVHGALCVAYSGQCLTSESLGQRSANRGECAQACRLPYEMVVDGQPHTLEDQRYLLSPQDLAAWELLPELQRIGVASLKIEGRLKDAAYVAAVTDAYRQRLDQTPASAPQVQRQLELAFSRGLSTGWLEGVNHRRLVHGRWSKKRGPLLGQLLRVERGGWLHLRSREKLHSGQGLVLEQLSSDPLQPPREIGGRIMVCERLGDERWKLRLGPDRVDGSGLRPGASVWLTSDPDWQSRWQRAARRTVEARSRDLALRVSGRLDAPLELHVLEPQGFELKLCSTMPLESASQRPLERERLEQQLGRLGGTGWSLQHLEIELEGDLFLPVAELNRMRRALLEQLEVSGDDSTDSGPVPAATKTPNPTELLAQMYPPAVAPLSETKPGLVVLVRSLEQLQALVDLSGTDLPIRSVVADLEQPWELREAVAIGRGCWPEGVWLAGARITRPDERWSLEPLIRARPDGFLVRNADQLEVLTPLAPCIGDFSLNTANPLSFHWYRDYWTLQRLTASYDLNLQQLLDLAAAVDPALLEVTLHQHMPLFHMEHCLFCAFLSAGKDHTDCGRPCEKHHVTLRDRSGVEHPLRADLGCRNTLFNGTAQSGVEALPSLLRAGVRRIRLELLDEDASATRRRVSLYAEALAGRMATQEVWSQEQIHHQLGVTRGSLRSKGPERTSRFSR

SEQ ID NO: 21402 - protein, 825 aa, Cyanothece sp.
MKLERQSVMTGLLTGVFAVCIAPTVQAQVTITNVQINTTDQGLEIILETPEGQQPEVFSGSIGTTFFADIANAQLNLASGQDFRQENPASGIASISVSQQPNNLVQITVIGIETTPIVQINPISGRLVLTVTPEQPSETEETPDSETSNQQEDEAIELVVTDDTQDNSYFVPNSSTATGTDTPLRDTPFSIQVVPNRVLRDQQVIRLDDALRNVSGVQQNSGDPRGQRFQIRGFDSSSVLRDGFRQTFGRSGNSGFQELSNVQQVEVLKGPASILYGALEPGGVINIVTKQPLADPFQQIEFQAGNRGLLNPSIDFTGPVSRDKSLLYRLNFAYRNERSFRDFDTYIERKFIAPTFTWNIDEQTKLTFEVEYSDDDRPADFGVLALGDQVVDTPNARNFGEPGDYLRAETLRVGYRFQHDFNENWQFQNAFNYLRYDSTFSSAFTFSVDEETLTAFRSFIYLDQPSTNYELKSKVIGNFDTWSIKHKILFDVGLTRREQLGNIGRSNFSDIPLNIFAPVYGTVPRPDPNTQDIFTFSDYQVDQLRITFQDQITLFDNLKLVAAFNYDSVEQKFWDRLTDENTVQYDDSVVPRVGLVYQPIEEVSLYGSYSQSFYPGAGQTVSGQFLDPEESEQYEIGIRAEILDKKLSFNLAYFDITKNNVATSDPEFPIFSVAVGEQRSRGVELDIVGEIIPGLNIVFNYANITAEITEDNDIPVGNRLFNVPENSANLWLTYQIQDGFFEGLGFGGGFNYVDERFGDNANSFRLESYTLANAAVFYERDNWKFALNIRNIFDEDHIKGSENSRNNEIYPGEPFTLLGSISVKF

SEQ ID NO: 21403 - protein, 171 aa, Cyanothece sp.
MKQIFTSIVLFALLLTVNQSVVSQTNFQQEILTAHNKYRQQVNVSPLIWSNQLANDAQQWANYLASLGGRKLQHDSNTNGQGENLWLGTSKRFSYTQMVDGWGQEKQYLTSRRFTLETVSSTGNWSDVGHYTQIVWKNTKKVGCATSKAGGNDILVCRYSPQGNIIGQPIY

SEQ ID NO: 21404 - protein, 430 aa, Cyanothece sp.; identical to SEQ ID NO: 21358

SEQ ID NO: 21405 - protein, 899 aa, Cyanothece sp.
MTFSEEFTTNNDSDFLDSESAYPVAFGITFTPQITGIALGLLGLLGAIYVLFTFFMPAWTNYNTLKADQANKQAQVDQQKSGKLDQKMLQVQAQLQKSQATRNKVLSLFSSESSLKTLLLDINNFIEARQLKLITFKPTGEPAVVSDGSLGEAVNNRLKRQSFQLEVEGAFQKTHELLQDLERLQPLLILKELSSQLVEEKFAVKVVDVNQQGGQVVGTGQAVPIGEDNLKTTFTLDAILPLTPEEIAKLKPPAEENKPPAEGNKPPENPSGQPPNPIPPSRSSDIMIPNPEVLIKSNGSSIPDSLQPTMPMAPTLPRAVAPPVGDIAISNINAATDGIDLGTSIIVPRLVLRQAPAREVLAVLARYAGMNLVFTDDTRAAAAATAGQPPGAPSAGEVTVSLDLENEPVEQVFNSVLMISGLQANRRGRTIFVGSQLPQAAQNLISRTIRLNQVKSASAGTFLASQGAEFQRLVTVREDIIDPLTQRVIGQRELPPELDPLTAQRTEGSNSPQLLTGLAVSSDDRLNTITLVGEPRQVQVATSLLTQLDARRRQVAVNVKVVDIALNNDQSFSSSFSFGVNDSFFVQDEGAAFLRFGGPSPIDSAEFNSATGRLGVPPAIPNPFAEGGNIFLNQGSFQFPVLTDGGFPQIPGASLGVSNDFRAVGVSPPENADDPFEYQLPSFFEFPRKFLSQIEATIQSSNGKVLTDPTLVVQEGQQATVKLTQKVIENITTQVDPLSGVRTTTPVLSDAGLTLTIDIDKIDDNGFISLTVSPTIAAIGDVQPFDSGADGGFNQLFLLARRELTSGLIRLRDGQTLILSGIISETDQTITNKVPILGDIPLLGALFRSQTDTKNRSEVIVLLTPQILHDNGQWGYNYTPGRASAEVLRQQGFPVQIVP

SEQ ID NO: 21406 - protein, 118 aa, Synechococcus sp.
MWLLKQLEVKLSKPSVASLLLLGVLPLSSPMLGVGESTEAAFAQSPAPAVRIEEAIQIARSAVPNAVIKEVELEREDGRLVWEVKFTNDVEVQIDATSGDVVDIDDCTNWGKRCRKKR

SEQ ID NO: 21407 - protein, 806 aa, Synechococcus sp.
MRVTGWGWKAVSLGLGLGLSWGSLAQAQPAARIPETPLLAQATPRGATTIQEQIRELEAQIEAARRRGDQAEVERLQADLQVLRQGTPVFNLQQVTVTGTRTERTLADSPATITVIDRERLRQELIQNIQDLVRYEPGVSVRRNVRYGLQDFNIRGLDANRVLIQVDGIRQPERFSFGPFNIGRDTFELETLKTVEIIRGPASTLYGSDALGGVVTYTTLDPADLLGERDSHVGLSSQYDSKNQGFVNTLSLAGRQGNLEALLIYTRRDAREPDIKADPSFKDRQTVDGDNVLAKLVYRFSPLESLTLTGEYFNSRTTTTFSRRNLDPGISLFRETIDTERSRLSLEYRYANPENPAFELATAQIYYQPARTREPSVEERTITVQGRPVPVRRDTFNELVSNILGASLQAQSRFQTGDLSHRLVYGMEISTTRNERPRNRFQTNLQTGAVTQNIPPDTFPTKDFPDSDTVRFGLYVQDEIDFGGGNLTLIPGIRYDTYNLTPSPDEAFLKSGSEAASLFADAVSPKLGLVWRINPNLTFTAQYNTGFRAPQYNEINSGFTNLVSPFFRYRTLSNPDLRPETSQGFEVGLRGIYLQASFSLAAYYNTYNDFIEAFRRVGSEPSPPGPPGSPPPPPVILFQSQNVSRARIYGVEATGQYFFSPDLTGWSLNGSFAWAVGDNLTENKPLLSIEPLTAVLGLHYDDPSQVWGARLVATLVADPRDPQREVVQTNPNAPPQIPFVPSGYTVVDLLGYYNLDDNWQLNFGVFNLFDEKYFLYSETRTLFVGPEVERRAQPGRHVALSFSSRF

SEQ ID NO: 21408 - protein, 647 aa, Synechococcus sp.
MKVTVCLSLGLGILSLGIPAWGQAILDTGLSAEILNQPVTTPFRRPGLLRESSRPVYVITRQQMRQQGARTVQEALRYLPGILSDGTAGTQLGALSSQFMRGARTAQVLVLLDGRPLNDLGFFGGFDLSQITTDVVERIEVSPGGGSTLYGSDAVGGVINIVTVEPQPETETVLEAAVGSYGLNEQGIQSRGQAQDLGWVLSYRRLQSNNDFPFAIERLGKSGRRENSAVEYHNLQAKLTWQLAEDQVLTANALYLNKAFRVPGSVEFPSPDAEQNTNDLLLDLSWLWTQETGSLQARVFLDDLNYRFSAPQSQGSRDVILRNGWGSQLQYAWQAGENLEGVLGADYRSISARNTTFSFARGSANINYDDTVNQGALFARLDYSPDPQFHLDLGIRQDFSSLANGSATSPAVGIRWAVAEGTTLRASYAGSFRTPLISELFFRLRGFFEVDGNPNLRPERGESLDIGLDQTLGDFGLLRLTFAHNRIRDGITFVSLGPRRGTYENIGLVEYTGLEAALDLRLGENWTLFANYTLNDPIIRAALNPATVGKELAFVGADSFNLGLSYRHEQGWYGSILVHHIGSFFTNNANTESLPGYTTVALRGGIPLAEALSLELGIDNLLDEQYEVFPGYPGVGRTLRVNLRGQF

SEQ ID NO: 21409 - protein, 149 aa, Synechococcus sp.
MKRISAVNGLPIREFFDEPTDPNDNPGIPWPGGAATFLQGAINQPVRPGARLQFAIYFLLDSPGSRLTVCDPLAPGLGYVPGSLSVTPAGGSPVALSDAVDGDAGAFIPPGQAVPPACGGITNPNGLVVVNVGQAGSAGAIRFEAVVPR

SEQ ID NO: 21410 - protein, 723 aa, Synechococcus sp.
MMNRRVAWGCALSLILSLPLLAVESQLDEAAAQQLTSANPQSLSRITDIRLVPHGNRMKLEINTAGGARPQVFFTQQGQSWIGDITNAQLDGGQGRYRQESPLPGVRFIEAKQMGNDSVRIEIAGVAAAPQGLLAQRSPTQLVFEFEGLPSAPPAPVAASPSQVAPNQPASPARPQPVAPPPAPASPPAAQNPPSPQGTAPNPQPLAQTPPSSPPAQAAPTPQPASPGPVISQVPSVGQLNQPQLPPGSVELSTSPFQGRAVAPPAGDLAVGSIIPAPPPVDLGSNAKITLTLRDAPVGDVLSLLVRRAGLNVVLNDVPPDLTISLDVADSPLQETFNFILRLKELQATRVGQTVFIGTTLPGVGQQIVKTYRLNQLRIEETEQTFVFNASGTAGGGGTVEIDARQLSITPSEIRSRILAILEASNIPLAQESAIQADPRTNSLTIVATPTQHDVIAAYLAQIDLRSRQVLISARFIEINLDNNSSLGVALGSASGNFALGSGDNTVFGGTPLDQPAGSSVPNVGSFPAAGTGGSLVFNTLNRLQQSLAARIDAAIASGTAKILADPKVVVANNTGAAIVVGQEVITNRRLQTDPATGISTVVFEKGNAGVNLLIQNVRIDDNGYITLNLLPQISSIGSQITLSDGTVISLLNQRSVGTLQTRLKDRETLFLGGLIQEEDRVSVDKVPLLSEIPLLGSLFRRQNTTNTRSEVVVLITPVILED

SEQ ID NO: 21411 - protein, 513 aa, Synechococcus sp.
MAKNKRNKSKRSRNGRAKNKRGKNRKGRNTQVNNEIANSEGTSADASNNKQLWNESKQNIVDVKWSNKIHENALLNTGIPLEENGWVRPGIPAKWISDSSFKKQKNTTLLTYSFMTTKSKLDYGDDRRETIVPYANFSEKQQNDIAKLFESLSDYANIRFIKVPDNNTVGTIRIGFNTITDEAGKWRPGIYATADTPNPEPRGGDIWFNKNFTKDNFSTGLVENVGPATPSAVMLHEILHALGLEHPDNPKRVTPKFARNREYTLMADEFSHRAEFTQYFKDNGEIASSLAEFGRSEIRKDYGVSSTPMTWDIAGLQYLYGANTKFQQGNTIYKYSNTIPFYETIWDASGIDTINLSNFKKDLVVNLNGGQLSTLSFDVADQNWSDKQHGNLGIAFNTVIENGIGGSGNDSIIGNSANNTLKGNAGNDTLSGKDGIDVLIGGSGQDIFKLQQGKGHAIIQDFNSGIDKILLQQSSGVKLISVNAGIEINQNNDLIAIVQNYEGRLNQSGVNII

SEQ ID NO: 21412 - protein, 734 aa, Cyanothece sp.
MNNYCYPLILGGMASLFLSIQPSLLASAESFDSRQEKNSSQQQNPFDSPQSSVESLSLSSDEFFSPEISSKPFSIESIGQDIDKSSSIEESSLNFPILESDKIKDQELITQSTPMISQPEIIIEENNQMLEPSVPAYPVVPRAVAPPVGDMAVSNIDAMADTINLGTAAIIPRLVLREAPAREVLAVLARYAGFNLIFTDTQTAAPEGQGGAVGSQQTVSLDLENESVEEVFNSVLMISGLKANRRGRTIFVGAALPAAARNLITRTIRLNQIEAINAATFLATQGAEYQRLVTQTEDIVDPLTNRVVGRRDTPPELQPLVVNRQEGSNAPFLLDGLTIATDERLNSITLIGEPRQVQIATSMLVQLDARRRQVAVNVKVVDVQLAGTEFYNSSFSFGFDDGFFVQDGGTAILNFGNYNPPNAAQTRSSVPTPPVIPTTDAFGGGVVPNVFIDIQGSAPFNTVNQGLEQFADTLVPYARPGFGTLNNPFQPGVTEIDISRDEDGFIEEIEYTYELPNVFQFPEKFLLTLEAQITSGNAKILTDPTLVVQEGQQATVKLTQKVVESVNTQVDPLSGVRTTTPVLQDAGLTLTVEVDRIDDNGFVSLFVSPTIAAPGASQEFESGDGTTNQLTLLTRRELTSGLIRMRDGQTLILSGIISESEQTTVSKVPILGDIPILGALFRRTDNSGSRSEVIVLLTPKIIDDRPDSSWGFNYTPGPGAAEMLRRQGFPVQPR

SEQ ID NO: 21413 - protein, 385 aa, Cyanothece sp.
MSDNTMDLNQSNDQLQNSSQSNQKPNPIDTVATGVGVVSGGLAGAAIGRLVGGRLGAAVGAVIGGVAGANVGHEVAEGVDHSIEGVVDNVKNNVKQTVEEIKPSVKETVNSLKQTVEEVKPSVSGAVDSVRQTIDETRPSMKKAIDAATETIDETRPAIVETADTVKETVKDARPAVKKAVDKTSESIQSSTESLAKSVQGAGESVKDAAQEAKPKMRRAMESVSDDVQSSASKVADSVKGAASNQNTTPTSSINRATQEVSSVRTQSSTEQTVDLTKQMTSSAPISGSGASQNFDLAQREFEQGIKLASQNDFTGAQTAFRNGIKVMPESPELHYNLGVVLLEQGKKTEGIDYIRQARDLSRIQGNTQAAKTLENILKQIEVVK

SEQ ID NO: 21414 - protein, 817 aa, Cyanothece sp.
MAVFTVTNLLDNGEGSLRQAIANANSLDGADTIEFASNLSGGTISLTSGELSITDSLTLEGLGSDLLTISGSDLSRIFNINDQTEYYSYNSNILDVVISGLTLTNGFVSENTQSFNAPAASGGAIYNYDENLTLIDTVITGNTAAGDPFAYYENAEALGGGIFNYSGTVTVIDSVISSNTAQGGTVLLDFIREGGFVGSGGGIYSRTGNVTVINSTISDNTAKTGRGGDFVFTYESHGGGIAGGFNSTITITNSTISNNTVVGANTTNIYSREGGDARGGGISGDNVIVNNSSITGNTVLGGNGTGSFYVYYGYSGGYGGDARGGGISGNNVTVSNSTISGNIAQGGNGGIGGKANVFRGFFYGTNGGRGGNATGGGISSANLTMSNSTISGNTAQGGNGANGGQGADTATINEYFGYSGYYYYFAGNGGNGGNGGNSVGGGVAVSNNALIANSTITNNTLDSGTGGVGGSGGLGNESLNIPNGIDGTDGTIGNEIGGGLSANGTVTSTIIAGNTDNQDLAGTFTSGGNNLIGNGDGATGFIDGVNDDQVGTTINPIDPLLSPLQDNGGLTLTHTLLPGSPAIDAGSNPSTLISDQRGAPRVAGDGADIGALELADETLLGDQSSNSFTSGTGNDFLEGGDGNDALNGSSGNDGLRGGAGSDRLIGSDGNDLLIGGLDRDILAGGEGADVFRFESLADSSLLSPDRIRDFNQTEGDRFQLLPTNPSTLWNAGDVTGDNLRVALEAAYADSNQSAGGSQPLGLNEAVLFNFGSRSYLSINNTISGFNPEQDLVVEVSGIVLASGDENAGVLSVSDYFV

SEQ ID NO: 21415 - protein, 749 aa, Cyanothece sp.
MGGCGSFCTAEKCNDLQRQINALEIKIDECCRSGREGPPGPPGEKGDKGDKGDKGDPGEKGDKGDKGDKGDPGEKGDKGDKGDKGDPGEKGDKGDKGDKGDPGEKGDKGDKGDKGDPGERGRDGLTIVGPEGPPGPPGQPGVTGKTGEPGPPGEKGDKGDPGKDADSSLVSGVLGDLGIISDLEDLKRQLGGGGMSLDDLDAKLDEILDKLNGCCSTTEMISATTTDIKSETGNIQNGIGDLQRRSEVLGVRFDDFGYQLGAIFDFNFPPSPDPIELGDCREVLDADGNRQKVFVPGAFVGTYKNEKELMVIAVRHLDRLFKHICESSTATQAQDDRLWKLLGGDSLFEYDGTNIVEQTLDVESLIKAKVSQLTTDNEEQDRAKGNVVIKHLPDYLEALTSVEYWRGGHNEYPLKLPEDLTLSLSEVKNKLEIEPTSEWKWSDLTEAQEEILSIELETDLDWEVWRQKNDYDTYGKFPYEIKIEKNTLLKQDIDIREIKEGNDPPRYRYETSFVDAAEDDNIEISSLSDGLAEIMGFIIAEATNNKLLKELNSRQMFEVASLRQMLTSLYSKFESLQAYLGYKVTEQQDEYWLSFNPSPRQVNENDDQILELLNFLKPSRVFYTKELFGGKRNEALDAKINECLTASAIIKARYSESFSVFSQFVDFEGQLKEKFANSKDLISKIINKDGLTNDDPDRPDKTEFDDFIEEVEKGFSQQIGDIDQDGNPREPYGRGYGERPRIQRFKGSP

SEQ ID NO: 21416 - protein, 815 aa, Cyanothece sp.
MKIPSILPTLLFATGAVLSFSQPAQAQTLIQVTGIQLEPTPNGLKVIVETAQGNTPQAFIIPSGETVDIQLLDSQLNLPDKQSFQVENPVDGIASVTVTQGEANTVQVTIVGTQGSPQVELVPSPLGVVLDLRPSSTTVTPEEPTEEIDIIATTEANENDYIVEDATTATFTDTPLRDIPQSIQVIPEQIIEDQQVIRLDEALRNVSGVVQGNTFGGTQDEFIIRGFTSTSGNLLLDGFRLPNSGTTFRETATLERIEVLKGPAGVLFGFVEPGGVINLITKKPLPEPYYDAQLQIGSFAFFRPTFDLSGPLTEDKSLLYRLMFGYETEDGFREFDQGVNRFYITPVVSWKPSDQTEILFDLSFIDDERPFDRGIINNVNFNIPEVPVNRIFGEPDDKSEVEEFSIGYRLNHEFNENWEIQNNFRYISSFNFNYRAEPLYDADEFGNLSRNFRSNDAYEENFNLQTRLIGKVATGPVDHTLLFGFDAFRETFWQQQNRLPVGLTPSINLFDPQYNVIPRPFLSELTTRLFFFRNRTDYVGLYLQDQVTITDNLKLLLNGRVDIATQENKSRETGEETVNGDSDFTPRVGIVYQPIEPVSLYASYSESFVPNGSTRADGTFLPPEEGRQYEIGIRTELNEGRVVLNLAAYDITKSNVATDDPLNPGFSIPTGEIRSQGIEFDVIGRILPGWNIIASYAYTDARITEDNDPERVGLRVGYVPYSAASLWTTYTIQSGNLEGLGFGAGFFYIGDRIDGFIPSVFLSSYTRVDAAIYYRRKNWQAEVNFKNLFNDYYIESGFYEPGAPFNVIGSFSIQF

SEQ ID NO: 21417 - protein, 1400 aa, Cyanothece sp.
MADFILDAQGGILTGTNEADLISFAVNITGQINSLEGNDTIQSLGGNSVTGTQIILANQGDDLISSASTGGFLTTIEAYGGQGNDTVVGGNFNDTLYGSEGFDTIQGGGGDDSIGGGLQTASQTSDLADTIDGGEGNDIIFGNLGIDTLVGNIGNDTVFGGRDGDSIDGGLDNDSLVGGEGADTITGGTGNDTLVGGLQTSSQTGDLADNLNGGLGNDVIFGNLGNDTLIGDIGDDILFGGRDNDTLSGGANNDSLVGGEGADTITGDEGDDTIRGGLQTASQSDDLADSLNGGLGNDLIFGNLGNDTLLGDIGDDILFGGIDNDSIDGGADQDSLVGGENIDTITGGAGNDTIIGGLQSGDQSNDEADNINGGVGNDSILGNIGVDTLLGDAGNDIIFGGRDNDSIDGGTENDSLIGGEGTDTLVGGNGNDTIIGGLQTADQSGDQGDTITGGDGNDSILGNSGVDTLLGDGGNDALFGGRDNDTIDGGENDDTLVGGEGTDTLVGGNGADSILGGLQSEAQTGDLADTILGGAGNDTISGNLGDDTIDGGDNKDRINGNEGADSLVGGAGTDTIDGGEGNDTINGNEDNDSLFGGAGTDTISGNLGDDTIDGGEGNDTINGNEDNDSLFGGAGTDTISGNLGDDTIDGGEGNDTINGNEDNDSLFGGAGTDTISGNLGDDTIDGGEGNDTINGNEDNDSLFGGAGNDTIDGGEGNDTINGNEDNDSLLGGAGNDSIDGGAGNDTINSNDAANPGEIETLIGGAGADNITGGNGNDSIYGGFSTGAQTGDEADSINGGAGNDTIFGNLGNDTIDGGEGNDTINGNEDNDSLFGGAGNDSIDGGAGNDTINSNDPAVGGTETLIGGAGADNITGGNGNDSIYGGFSTGAQTGDEADSINGGAGNDTIFGNLEDDTIDGGNNNDRISGNEGNDSLLGGAGNDTIFGNLGNDSIDGGSGTDSLIGGEGGDTLNGGDTEGDIIYGGFVGNNQNNDEADSINGGAGNDTLYGNLDNDTIDGGNDEDTIYGGEGTDSLLGRDGNDSIYGGFSGNNQTGDEADSINGGAGNDTISGNLGDDTIDGDNNNDRISGNEDNDSLLGGAGTDTLFGNSGHDTIDGGEDNDTINGNQDRDKLLGGAGGDSLVGDTGDDTIYGGFSGDTQTGDLADTIDGGTANDLLFGNLGNDSIVGGTGDDIIYGNEDGDTLLGGNNNDTIYGGFSGDTQAGDLADTIDGGIANDILFGNLGNDSIVGGTGNDTLIGGSGADTLTGGSNNDHFRYLAASDSNNSTVDRIIDFANSDRISLATNLFGLTFNANASKTFETVAPIGGTTFTSVADIYGGITGLTASVAGDLTVANVTVNGGTFAGRYLFINDQFAEASATNDILIRFSTNVTLNPNNIVFFT

SEQ ID NO: 21418 - protein, 786 aa, Cyanothece sp.
MAVFTVTNLLDNGKGSLRQAIARANSLEGTDIIKFSRNLKGSTITLTSGELSITDSVTLKGLGAEWLKISGNDSSRIFNIDDGSDQILEVLISDLTLTEGRTTGSEDFAARGGAIFNANETLTLINTSITGSTAQGASVDFYDYYNDTTWSGGGAIYNSSGNLTIINSVISGNTAKGGTSYQQYQYLYAGGSASGGGIFNATGNLSVTNSIISGNTAIGGDGELGGSGHGGGISNRGSLTVTNSIISDNTAEGSYGDGSAWGGGIEGSNITVNNSTISNNTAIGGRGRQGIRYRSIEPYAGSIGGYASGGGILGANLIVNNSTITGNTAIGGEGGRGAYGYNSSYLALAEGGDGGTGGQARGGGIGIMGISSIATISNSTISGNTVIGGNGGTGGSGALFYIDDNSYDAGDGTDGEGGSGTGGGIWAIYAHLTITNSTITQNSAQGGMGSSNGQTAGAGVITETQLSGNSTPITLTSTIIAGNTDNQDVAGTFTSGGYNLIGNGEDSTGLIDGVNHDQVGTTANPIDPLLSPLQDNGGPTLTHALLPGSPAIDAGNNDSNLISDQRGAPRVVGDAADIGALEVADQTLLGNESSNSFTGGAGNDFLEGGDGNDTLNGSKGNDGLRGGAGSDRLMGSDGNDLLIGGLERDILAGGEGADVFRFESLADSSLLSPDRIRDFNQTEGDRFQLLPTNPSTLWNAGDVTGDNLRVALEAAYADSNQSAGGSQPLGLNEAVLFNFGSRSYLSINNTISGFNPEQDLVVEVSGIVLASGDENAGVLSVSDYFV

SEQ ID NO: 21419 - protein, 825 aa, Synechococcus sp.
MHYWYRLLGFTGGVALFWAAQELSAVAASPQPSDATAVSAPMTLTQATTIITDVAIATEGDQVELQFTATAPLENATVIQRAATTEITIPNANVTQAEVLQEFAPESGLEQIEIRNQADNSVQILIRNGDRQIQTQLITTATGLTLNIEPVLVSTDEDNIEAFELVVTDAEQPYNPRSATTATGLETDLRDIPQSVEVIPQAVLQDRNVTELGEALETSGSIVSSGGRGTSVFGPGFLIRGFAAEESVFLDGIETFSLAALDTNDIERVEVLKGPASVLFGQGDPGGVINLVSKEPLAEPFFGIDAAIGSFANYRGNLDLSDALTENGAARYRLNFSYSNFGSFRDLVDGERVVVSPRLSFDLSEATSLDVYGQYAYTRETIDEGIPFTASGPVDVPRSRFVGEDFGEFSEKRFNLGYDLNHEVNENFSLKHQLQFLQYRPRRYAPLYTFFDETTGNVDRLEYFAGGSYQRFFTNIEAIAKFETGGIKHQVLGGVEYRNTLEQPEFQFSNDYTPINVFDPVYTGVPYAIAPEFFRDDTIKTVGVYIQDQIEFSPQFKALAGLRYDFVEQLRSTQDLGGPRNEFFQSDEALSPRLGVVYQPIEPISLYASYSKSFEPTFGTSRDPDGMNFEPERGRQWEVGVKADLSDRLSFTAAAFDIRKQNVIVRDGAFNGFQTGEQTSRGLEFNLNGALTPGWNVTAAYTLLDAFVSKEDINPDIEGNQLPNVPQNQFSLWTTYDIQQGALEGLGFGLGFFYVGDRPGNIDNEFTLPSYFRTDAAIYYRRDNWRAQLNFENLFDTEYFTAADEFQFATPGAPFAVTAKFAVDF

SEQ ID NO: 21420 - protein, 320 aa, Synechococcus sp.
MFIRNATAIALLGLFWFQGAASNSNPVPQGPTPILLAQATIFEVGDKVDIERQGSWRPGEILAIQSAPEAAVRYQVRYLDVGFVEDNVSPERLRPTVATQPVAGRLPQINSVSEPIYVERDGVWVEASIRSYSYSSRTGNRFTVQYRDNGRLETDVVAQRVRSVAEAKAAGIEVSEFDLSTQAGIEQMLAAHNEWRSPHNLPDLVWSETLANHAQTWAERLAAQERVEHNTSDDYGENIAKSSNLVLSPTAVVNLWGNEIQDYDYGTNRCQPGKVCGHYTQIVWRDTEKVGCGMVRKDNGWEVWVCNYDPPGNYRGQRPY

SEQ ID NO: 21421 - protein, 831 aa, Synechococcus sp.
MNNHLCHWSALTILGVTGIAILNAAPVIAETQDFEVLPPTIEISSENADVLTDVQVQATESGLVITFETTAEALPAVTTTTVGDRLIIEIPDVILSLPGENIVEVLQPTAEIESVQISPGENGGGQLIITGLTAPPMVAPRLEGKQLILEVTPDESIAENLELVVTADRTANSYTVSEATTATRTDTPLAEIPQSIQVIPKAILADQGVSSLDDALRNASGVLQNSADARGQRFVVRGFDSASVLWDGFRPTFGFSGNIGYPELANIEQVEVLKGPAAILYGVSEPGGVINLVSEKPLSEPVYEATLELGNRNQVAVGVDLSGPLNEDGNLLYRLNALYRNSDYYRNFNVDLERTFIAPTLTWQIGDRTDLDLFVEYSADQRPYDTGLVAIGDSVADIPFDRNLSQLDDINEATYWRTGYEFEHRFSDNWKVRNGFNYIAYNTIFESSFTLGFDPTTGDLDRSYIQLDQPSSTYAVQTNVVGEFSTGAVDHTVLMGVDYIHRNQLGNKLRGFGPDSYFTQNIFNPVYGVVPQPDFETQPIIRFGDTYINAVGIYLQDQMDIGDRLHILAGLRYDTVSQRVVNPTSLTETTQNDDAFVPRLGVVYRPIEPISLYTSYSQSFAPNSGTNVDGDTLPPEVGEQFEVGVRAEALEGALVANLAYFDIRKNNVATSDPDNIGFSINAGQQRSQGIELDVMGEILPGWKIVANYAYTDARVTANNDGQAGNRLINSPYHSANLWTTYELQTGSLKGLSFGVGVNYVGDRFGDLNNSFSLGDYFLTNAAIAYRQDNWRAALNFRNLFDVEHITGTRNNRFEVYPGEGFTVLGTLAVEF

SEQ ID NO: 21422 - protein, 861 aa, Synechococcus sp.
MSPDKAIAQTNPETNQLAQAQPATITGIRLDTRPNRVNIILETAAGQPLTLPGQPFIQRGTDLVATIEPAILTLPDGQTWQFTAPTADIAAITVEQQGGDRLEIIVQGQGELPTTAVSLETMATIATKDDMADLTEMPLDLDAMPVEELEITVLGTRSPRLVSRTPGSISVIDAEEIDDNLVQDLRDLVRYEPNVSVGNDRRYGLQDVNIRGLGGNRVLILNDGIRIPTQFTFGTPALGRDYVDLDSLQRVEIIRGPASALYGSDALGGVVSFQTIDPSDLLALTDKNNFTRISTGFETTDKSLNYGAVTAFRADSLEALIGYTGRSGFEARLPEGNEFVDDRYGDRDNFLGKLNFKLSENSTLGFTTEIFRSTNEFQVAPITAALLQGPRGFQGQNETLEADSYRERYSLAYLYDNPDGEGFIDNAKLQVYYQNAGVDELRTQDFLNFAGTERRFRNLSNTFTDELFGGEVQLQSNFRWGKIDNRLTYGFDLSKTNNERTRDGLETRFDSTGNVTSTTNQVGSDNFPVKDFPDSETTRFGVYLQNEMALSDTFTLLPGLRYDTYRLDTTIDELYQRNSPDAEAADFSDSALSPNLGFVWQTSPEIALVGRYARGFRSPLYSEINAGFTNLTSPFFRYKTLSNPNLKPETSDTFELGIRGDFPRGNFSVTGFYSYYENFIETFANAGTTLINGNLVNLFQSQNVGAARTYGVELAGEYRFSEQPHGFSLIGSLGLTVGDDLEDDEPLESVEPLKAVLGLRYRAKEDRWGTDLIATLVGEPRLRGDRPAGSYSPEGYAVVDLLGYYNINPNLKLNAGIFNLFNNQYFLYSDVRPLLNSPEPVDIARYAQPGISLRAGLTWQF

SEQ ID NO: 21423 - protein, 832 aa, Synechococcus sp.
MKQQARDSFALAVGSMMPVLIATQPAQAQTSAITGIEIIETLTGAEVFLQTTTAQLLEISTTQSDNTLITEVTNAQLRLPEGQPLQSTSFSNTIESVEVLQATENSVQIQITGMDALPEISTDLTIDGLFLRAQGSESNWVTDDGTETLELVVTATRTPEDPEDISRSVTIITRDQIATQAALNQNLGDILGQLVPGFGPTSDRAFTAASLRGRTASILVDGVPLNVNNRDFDRELKTIAPNAIERIEVVRGPSALYGGEATGGIINIITRRAGEERLVTQVELGVDAALGNFEGESFGNFLRYGLSGQENNVDYLVDLSRTSSGAIFDAEGDRIPVIQGNDESETFNILGKVGIALGEQQRLQFSANHYNSKRTTDVISDPIVDAIPGVQKAQALEVGELQFPAGGGPQTDRNTVFNVSYNHADLWGSNVSAQVYYRDNLSRTDPRDRRPRPFGIFQGELNSENWGGRLGVQTPLTPKLSLLWGADYDQETTSNTFNLFDPNAFDASNGQVNVLTEQRALVPPFDLNSLGLFTQVQWEATERLQLVGGIRYEKIDLAVGDYTTFFGDFIEGGRKDFDTVLFNAGLVYDASDHINLFANFAQGFSVPDFGLVLGFPDPGFSVASDVTVNQPQKVDEFELGIRGNWRNIQASIAGFYNQSDLGSTFEFNPSTGFFDILRAPERVYGIEATVDAQLNDTWNLGGTISWSEGEADLEDNGTYLPLSSARIQPLKLTAYVENETLPGWTNRLQALYVGSRDRAFQEDIDPREIDSYFLVDWLSSVKLGQGTLQIGVKNLFDTLYFPAYAQRSAGFSDTFNSAGSGRTLSLRYSLTF

SEQ ID NO: 21424 - protein, 656 aa, Synechococcus sp.
MTSFFTTQTICFTIVCFLCSSTAVFAQEENDLDDEQETVDFELTVIDQLLNQPVYAPSRQEETVQDATRAAYVINREQIEAQGYRTVNEALKYFPGIFIDSTAGSRLGAQSSQIFRGANSSSQTLILLDGRPLNRFDSGNFDLSNLTTDNVERIELIPGGSSVLFGSNAIGGVINIVTRQPGFNQPVAVEIGVDLGSFGYNRQNVGVSFGAETQAVRLAYDRTAAENDFDYDIAARGLSGVRDNAATNIQNVNLQVVNQLGDRHRLRFNGIYSSKDLEIPSSVSSPSPNATQYDNNWLLSLDLESRLGNSDDSLLTTRLFADLNDFRFFDENQFGTTDARYENNSFGAQIQHNWQLNETQNLTYGFDYRYLTAKAEDPGVFGFSYDENLSQGAIFARYGLDITPELTLNLGVRQDFNSLADGSVTSPSAGFAWQVGDSTRIRGNYARNFRVPTAVDLYFPGFSNPDLVPELGNSFDLGVDHRFSDRALVRLTYFNNTLDDAIVFDLGTFTPQNVRKARNQGLEAEVTLQLSRSLSAFANYTWNNSEILADADPTVVGNEVAFAGTDYFNVGLAYENPQGIYAGIFLKRVGDRLTNNANTESLAGYTNLDLRARYPISDTVNLTASVENLFDADFETFPAYPGVGRRFQIGVNAQFR

SEQ ID NO: 21425 - protein, 771 aa, Synechococcus elongatus
MQAWKILGSGLVLGTAAIAGQPSPVWAQAASTIAANPSATEVNRVLVTPTTNGISLSLSTTGTQAPQAFSTNLDKVWVTDLIGARLNLPEGKSFTQPNPVPGIESIAVSQVSENGVRIVVTGSDRPPIVTNSSRNGGSLQFELSTQTAIAAAPSPSAPLVGAAPRPNLRPPAAPAPQRTAQATPPTPIPVSPAPQPPVQPLDPRQVLQPTPSPAPGQLPPLQPRAVAPPLGDIAISNTVPQGTAVTFPNARPVPRIALRNASAREVLSIIATSAGLNLVYLDSNGQPTAAAPVVSNEPKVSVDLQNIDAQSAFNYVLQIAGLQASRRDNVILVGRNLPPSAGGLVSRTFRLNQAVAQNVAGYLTTLGANSVVSFTKKVCVSTGVQDTTATGGGAGTGAGQGQIQTLSQTSAQCFDEPEVKELKVPGTPAGPLPLKNISITADIRTNSLSIVGDPQAINFATGLIQQLDLRKRQASVNVKVIDLDLNDLNAIATSFSFGIGNTLFSGSGGLRTTVIDNAGSVIQPPNDSVFNPSNLPAGINPANPLLALPNQLTNNFLGALSASIINNKTKLLTDPTLIIQEGERSEVKLTSQVVQKIESETTTNGSGPPTVSRTIDLADVGLQLTINIERIDDNGFITLTVLPAISSPQDVVTFGDPNTNGVLTTLIKKREVSSGKIRLRDSQTLILSGIIQDEERERVAKIPLLGDLPLIGSLFRTSYTDRQRREVVVVITPKILADTDATVFGYGYQPSPPAQSVLNNTLQTPTVAPLP

SEQ ID NO: 21426 - protein, 773 aa, Synechococcus sp.
MRFSPSRFTALVLIAGLSAADVGALDGLMNNVSRQVQAQGALALRIRRGPSGVEVVVEGVGAQPVLQQRINGGVWEGRLQTQGQPGVRNGSQQLSDPGASLAKVAISGSGQTYQLEVVPVPGQTLQEPVVSADGRNLILQFNGLATAPTLQTGRLDLNTPGSVPQARYAPPLRPRAVAPPLGDMAVGTMVLQNRSFVNVSGPPVTLTLNNAPAKDALMALARLGGYGFVFVGEDSAASGSAEPSSVATVSMAFQNESYARALNGVLLASGLQGKLDGRTLLVGKGAATKTFGPQMSKVIRLNQVSARSAAEYLGNLGATFNLTNTITTTTGEPASAGTSQLSNQTSQINSTILESESFGASTGPLRGLVVTTDSRLSTVTLVGDSQLVAIAEGYLKQIDLRQRQVALNVKILDIALSNDSQINNSFAFRSGNAFIVSENGQLLANFGAYKPPGSEQGGLPGRYNADQGTTPIPGTGALDGGEGFVDSPTSPFPLPGSVTRIGPDGVTERGPFRPDFGTFDNPLQPGIDEIDEDGRVTYRSPTRFQYPVNQFFDFLAAQIQSSSTKILASPTLIIQEGSESTQGSDASKISADGKVGRERTNEALVSVGTKLVTSFEVKQDENGNNFCQPVFSNAGLTFGARVEKIDDNGFVTFSLSPEISAAVGVPETIGNCGNINIINSRTLDTGKIRVRDGQTLILTGVISDTDVQAVTKWPILGDIPFIGQFFRSSSGDRTKNELVILVTPRIIDDTQGGSYGYGYRPSLPAARQIMSGS

SEQ ID NO: 21427 - protein, 86 aa, Synechococcus sp.
MLGILSPASPMLSTGGSRRAAFAQSFALGIPIKEAIRIARSAVPNAVIKEVELEREDRRLVWEVKFTNDIEVKIDATTGNIVDIDD

SEQ ID NO: 21428 - protein, 392 aa, Synechococcus sp.
MTSLSRGAHRLKGWIALGLLTLLLLGGLGGVAPSQAQNVNQLQQRQQQIQHQIQSTQRRLGELRQAEEEARRRMGSLRQNLRQTESSLRDNQYRLEQAQKALEQAQKELQELEDRLRRQQQGTAARLRYMQRQGAEHWWALLLTSRDLNEFFDRRHQLQLLIEADRQLIQELQAMAKEVDQQRIALEMQRNEISLILQELAAQKNQLQQQAVAQEQLLSRLANERAAYEAAQRRLEADSQQLTLLIQQLIAQQAQQQGGRDPVQGTGRFIAPVRGPITSGFGWRVHPIYRSRRFHAGIDFGVPTGTAVRASDRGTVIYAGWYGGYGYTVIVNHGGGITTLYAHNSRVAVGVGQQVQRGQAIAASGSTGLSTGPHVHFEVRVNGQPVDPRRYL

SEQ ID NO: 21429 - protein, 696 aa, Synechococcus sp.
MMNRRVAYGCALGLILSLPPLALESRVNEAAAQQLTSANPQRLSRITDIRLVPNGNRMQLEINTEGGARPQVFFTQQGQSWIGDITNAQLSGSQGRYRQESPLPGVRFIEAWQLSNDSVRIEIAGVAAAPQGLLARRSPTQLVFDFEGLPSAPPAPLAAVPPQPSSNPVAPGQPASLNRPQPVAPAPQPAAPAPASQPVAQNPAPPQTTQAAPPAPAVPAAPVISQVPPVGQLNQPQLPPGSLPTESPFQGRAVAPPAGDIAVGTILPDPPTVDLGSNARISLTLKDAPVGDVLSLLVRRAGLNVVLNDVPPDLTISLDVQDSPLQETFNFILRLKQLQAQRRGQTVFVGQNLPGVTGILVRNYRVNQAVATDLASRLEEVLNAVAPGAQFVVDERTNSITVIGNSRQQDIAAAQIAQLDVRRRQVLISLRAVDIRLDKNESLSVNLGGASGNFALGTLGDANFGGRPLNQPAGSSVSSIGPAGPSGSITGIFNTLNRLQQSLALRVQSAIQNGTGKILTDPKVVVADGGSSRISIATSVPVNVETITIPQGENQPPVVTQRLQREDAGVILDVSEVRIDDNGFVTLTIQPEISIPVPSQILGGGDFAGILLFNIDRRQLQASQLRLRDGQTFIIAGLIQDRDIVDVQKVPFLGDLPLLGALFRSQSVNNERNEVVFMLTPYIMDDNVAFGLPPNP

SEQ ID NO: 21430 - protein, 656 aa, Synechococcus sp.
MNPILGLSLALGGLALGIPAWAQPAASSPSAQEVLETGVSAEILNQPVTTPFRRPGLLRDSSRPVYVITRQQIREQGARTVQEALRYLPGILSDGTAGTQLGALSSQFMRGGRTAQVLVLLDGRPINDLGFFGGFDLSQITTDVVERIEISPGGGSTLYGSDAVGGVMNIVTLEPKPGSETVLEAAIGSYGLNEQGIQNRGQAQDLGWVVSYRRLQSNNDFPFEIRRLGKAGRRENSAVEYHNLQAKLTWQLAEGQVLTGNALYLNKAFQVPGSTEFPSPDAVQNTNDLLLDLSWLWDQERGSLQARVFFDDLNYRFSAPQSQGSRDEILRTGWGSQLQYTWKAAENLELTLGADYRSISARNTTFSFARGSTNVNYDNTVNQGAFFARLDYRPQPNFYLNLGVRQDSSNLVNGSATSPAAGIRWVLAEGTTLRANYAGSFRTPLISNLFFRLRGFFEVDGNPNLRPERGESFDIGLDQALGDFGLLRLTFAHNRIRDGITFVSTGPRRGTYENIELVEYTGLEAALDLRLGENWTLFANYTLNDPIIRSALDPKAVGKQLAFVGADSFNLGLSYRDAEDRYASVFLHHIGTFFTNNANTQSLPGYTNLALRGGIPVAENLALEVGVDNLLDEQYEVFPGYPGVGRTVRLNLRGQF

SEQ ID NO: 21431 - protein, 809 aa, Synechococcus sp.
MRMNGRWWRVVSLGLSLGVGWGSLSQAQPNARIPDSTTPPLLAQATPAPTTLPEQIRELKAQIEAARQRGDQAEVERLQAELRALQQEGTPIFNLQQVTVTGTRTERTLADSPASITVIDRERLRRELVQNIQDLVRYEPGVSVRRSVRYGLQDFNIRGLDANRVLIQVDGIRQPERFSFGPFTIGRDTFELEALKTVEIIRGPASTLYGSDALGGVVTYTTLDPADLLGERDSHVGLSSQYDSKNQGYVNTLSLAGRQDNLEALLIYTRRDAREPDIQADPSFKDRQTVEGDNVLAKLVYRFSPFDSLTLTAEYFHNRTTTTFSPRNLDPGIRFFRETIETERSRLSLEYRYANPDTPAFELATVQIYYQPARTQEPSVEERTLTVQGRPVPVRRDTFNELVSNILGASVQAQSRFQTGDLSHRLVYGMEISTTRNERPRNRFQTNLLTGAVTQNIPPDTFPTKDFPDSDTVRFGLYLQDEIDFGGGNFTLIPGIRYDTYRLTPSPDEAFLKSGAEAASLFADAISPKVGLVWRINPNLTFTAQYNTGFRAPQYNEINSGFTNLVSPFFRYRTLSNPNLRPETSQGFEVGLRGIYPQASFSLAAYYNTYNDFIEAFREVGSEPSPPGPPGSPPPPPVTLFQSQNVSRARIYGVEATGQYFFSPDLTGWSLNGSFAWAVGDNLTENKPLLSIEPLTAVLGLHYDDPSQIWGARLVATLVADPRDPQREVVQPNPNAPPQIPFVPKGYTVVDLLGYYNLDDNWQLNFGVFNLFDEKYFLYSETRSLFVGPEVERRAQPGRHAALSFSTRF

SEQ ID NO: 21432 - protein, 171 aa, Cyanothece sp.
MKQIFTSIVLFALLLTVNQSVVSQTNFQQEILTAHNKYRQKVNVSPLIWSNQLANDAQQWANYLASLGGRKLQHDSNTNGQGENLWLGTSKRFSYTQMVDGWGQEKQYLTSRRFTLETVSSTGNWSDVGHYTQIVWKNTKKVGCATSKAGGNDILVCRYSPQGNIIGQPIY

SEQ ID NO: 21433 - protein, 743 aa, Cyanothece sp.
MNNYRHPLAMSGAISLMLLMSYPAIAVNPTATENPFEESTSEEKLFSKAVAINPRSEWKFDPQIAPSKVKEDIFTETSLEIAQIPNYYPNTPPSPAPAPSTNFYPNNPSQPSGFYPNTPNPIPPSRSSDIMIPNPEVLIKSNGSSIPDSLQPTMPMAPTLPRAVAPPVGDIAISNINAATDGIDLGTSIIVPRLVLRQAPAREVLAVLARYAGMNLVFTDDTRAAAAATAGQPPGAQSAGEVTVSLDLENEPVEQVFNSVLMISGLQANRRGRTIFVGSQLPQAAQNLISRTIRLNQVKSASAGTFLASQGAEFQRLVTVREDIIDPLTQRVIGQRELPPELDPLTAQRTEGSNSPQLLTGLAVSSDDRLNTITLVGEPRQVQVATSLLTQLDARRRQVAVNVKVVDIALNNDQSFSSSFSFGVNDSFFVQDEGAAFLRFGGPSPIDSAEFNSATGRLGVPPAIPNPFAEGGNIFLNQGSFQFPVLTDGGFPQIPGASLGVSNDFRAVGVSPPENADDPFEYQLPSFFEFPRKFLSQIEATIQSSNGKVLTDPTLVVQEGQQATVKLTQKVIENITTQVDPLSGVRTTTPVLSDAGLTLTIDIDKIDDNGFISLTVSPTIAAIGDVQPFDSGADGGFNQLFLLARRELTSGLIRLRDGQTLILSGIISETDQTITNKVPILGDIPLLGALFRSQTDTKNRSEVIVLLTPQILHDNGQWGYNYTPGRASAEVLRQQGFPVQIVP

SEQ ID NO: 21434 - protein, 825 aa, Cyanothece sp.
MKLERQSVMTGLLTGVLVVCITPTVQAQVTITNVQINTTDQGLEIILETPEGQQPEVFSGSIGTTFFADIANAQLNLASGQDFRQDNPASGIASISVSQQPNNLVQITVIGIETTPIVQINRISGRLVLTVTPEQPSETEETPDSETSNQQEDEAIELVVTDDTQDNSYFVPNSSTATGTDTPLRDTPFSIQVVPNRVLRDQQVIRLDDALRNVSGVQQNSADPRGQRFQIRGFDSSSVLRDGFRQTFGRSGNSGFQELSNVQQVEVLKGPASILYGALEPGGVINIVTKQPLADPFQQIEFQAGNRGLLNPSIDFTGPVSRDKSLLYRLNFAYRNERSFRDFDTYIERKFIAPTFTWNIDEQTKLTFEVEYSDDDRPADFGVLALGDQVVDTPNARNFGEPGDYLRAETLRVGYRFQHDFNENWQFQNAFNYLRYDSTFSSAFTFSVDEETLTAFRSFIYLDQPSTNYELKSKVIGNFDTWSIKHKILFDVGLTRREQLGNIGRSDFSDIPLNIFAPVYGTVPRPDPNTQEIFTFSDYQVDQLRITFQDQITLFDNLKLVAAFNYDSVEQKFWDRLTDENTVQYDDSVVPRVGLVYQPIEEVSLYGSYSQSFYPGAGQTVSGQFLDPEESEQYEIGIRAEILDKKLSFNLAYFDITKNNVATSDPEFPIFSVAVGEQRSRGVELDIVGEIIPGLNIVFNYANITAEITEDNDIPVGNRLFNVPENSANLWLTYQIQDGFFEGLGFGGGFNYVDERFGDNANSFRLESYTLANAAVFYERDNWKFALNIRNIFDEDHIKGSENSRNNEIYPGEPFTLLGSISVKF

SEQ ID NO: 21435 - protein, 440 aa, Synechococcus sp.
MSPPDETAVFDSLDLVIDTVVAREVLDSRGTPTVEAEVLLEGGASGRAIVPSGASTGAHEAHELRDGDAMRYFGKGVNQAVSNVEERLAPALCGLSALDQVAVDGAMNELDGSANKSSLGANAILAVSMAVARAAANGVGLPLYRYLGGPSATVLPVPLMNVINGGEHATNNLDFQEFMIVPHGAGSFREALRWGAEVFHTLKGLLNEQGLSTAVGDEGGFAPNLDGNDAAGDLLVRAIEKAGYKPGEQIALALDVASTEFYKDGRYSFGGGNYSSAEMVDQLAQLVSRYPIVSIEDGLAEDDWDGWKLLTERLGSSVQLVGDDLFVTNSTRLQRGIDLGVANSILIKVNQIGSLSETLQAIDLGGRNGYTSVISHRSGETEDTTIADLAVATGAGQIKTGSLSRSERIAKYNQLLRIEDELGSQAVYAGTQGRGPRGRR

SEQ ID NO: 21436 - protein, 789 aa, Synechococcus sp.
MAYFVDSQYEHYGTARATGINRELTESERSENQLRINAGATSDNGGGTGTTNIAIASAVLNTTLDTRATDIDISASAWGYEAYSYGLSGSTLNATNNAGVDLDIQTHSTVRGYDPANGLDNSHISTGEGNDRIEILASASGSSQGANLQSNQQLFARGMTAGSSINSGGGDDNIIINASAAQQSYSANAVLSATGVERSMIDTGDGNDTLHILASASTYYGSELGVGLSSSSVTLGSGDDNFYLHGNYENSSVDGGTGFDTLTLSRGTASSVVSRQDGSLSVSNGNQSLILQGIERINFADGTSYEAPPAKPGVTVEYGSTLISENGDSTTISYKLDSPPSETVAIWLRNSDTAEASLSHEYLEFDATNWNQEQVVTVTGLSDREVDGAKAATITHEIVSNDFDYAPRADGTGGVVIENIVFTNADADEHQTIYGDREVGRYNDRLIGEDGNDRIYGGWGRDQVNSGWGGDRIYGGYDDDVLYGEEGNDQLYGEADDDRLFGGSGNDVLNGGTGADYMSGGAGNDTYYVDNENDIIDDRGLSSDVDTVVLQGAVRFTLGNGIESAVGNNANNTLNGNSSNNNLDGGAGNDSLQGASGNDQLIGGAGNDTLNGGSGRDTAVFHGQSNRINLNISGWQNTREGRDRLVSIESVNAGGGNDVVTGNRGNNTLSGQSGNDSLRGAAGSDYLLGGNGSDRLIGGSGNDRLVGGSGNDRLVGGSGRDTFVLSEGAGYDRISDFRNGQDRIQVGAGVDNLRVQNRNGHAYVYEGRDLMAVVQGGAGDLQERGNFLI

SEQ ID NO: 21437 - protein, 760 aa, Synechococcus sp.
MHRLFPVALAAAMAMPIVEVRAAARADLKIIRFPGSIQLRLVGMGMNPDVRQIKTARGWTIEVNTGQSLAPLGSPKFFTMPDAGMDSITFDGTGTLWRLEVNALQGNTLAPPVITANGRDVEVSFQAQPLPSMEAGSYDLNTPGRVRRNTYVPPLRKRATAPPVGDMAIASIAIKGNEVRMPGAGKVERLTLRNAPARDVLMTLGRAGGYNVAFYSKQGEEGSATSGGNPISVDFQDEPIESAVNLVLTLGGLQAKRQGNTLIVGEKLPSFARQLMSRTVRLNQVSAARATEFLMSQGATLYRTKVLEEKQEGVEAVDVIGSSGNQVNTGPKTELTGKSVSIQTVEADGSASGALPLTGLTISPDDRLNSVTLTAEPALVSIAEGYLKTIDLRKRQVAVRVQVLDVNLDNVKTMNNSFALRTGNTFLVNREGEMLVNFGDLKPPDTERAGVPSLYDGSTGSPLVGAGAFSMPGEDQVFLDQPVRQFPYQGAGSRYPYGFRRTSPPSPVQGSNLRGNLYSRPGFGPFSSPGQPGVVEVDKDGLVTFEPPKNFQYPKDQFFDFVKALIRSSSAKVVADPTLLVQESESSSVGVGTTVFVNCSSSTSANGTRNFTPKKETAGLQVDVSVSRIDDNGFVSLALNPVLKAPSGLPVPVNCGGIDLPTRDLAVRELRSGEFRVRDGQTLILTGVIQEEVLESVDKWPLLGDVPLIGQFFRKSSNTRQKRELVIVVTPRILDDNQGGNYGYGYQPSTQEAKKLIYQP

SEQ ID NO: 21438 - protein, 180 aa, Synechococcus sp.
MTADDVLEFWFQQCRPWQWFRRRDSFDALVRERFGEAVERALAGDLNHWSCSPSSGLALVLLLDQFPRQIWRGEAKAFAGDPQALQLSLEALERGWIAAESQRPRRQFWLMPQLHSEDVSVVRAVIPLLERHVDEATASVACRHLAELERFGRYPRRNLALVRISSLEETAFLNAVPGSR

SEQ ID NO: 21439 - protein, 725 aa, Synechococcus sp.
MTPTTNGISLSLSTTGTQAPQAFSTNLDKVWVTDLIGARLNLPEGKSFTQPNPVPGIESIAVSQVSENGVRIVVTGSDRPPIVTNSSRNGGSLQFELSTQTAIAAAPSPSAPLVGAAPRPNLRPPAAPAPQRTAQATPPTPIPVSPAPQPPVQPLDPRQVLQPTPSPAPGQLPPLQPRAVAPPLGDIAISNTVPQGTAVTFPNARPVPRIALRNASAREVLSIIATSAGLNLVYLDSNGQPTAAAPVVSNEPKVSVDLQNIDAQSAFNYVLQIAGLQASRRDNVILVGRNLPPSAGGLVSRTFRLNQAVAQNVAGYLTTLGANSVVSFTKKVCVSTGVQDTTATGGGAGTGAGQGQIQTLSQTSAQCFDEPEVKELKVPGTPAGPLPLKNISITADIRTNSLSIVGDPQAINFATGLIQQLDLRKRQASVNVKVIDLDLNDLNAIATSFSFGIGNTLFSGSGGLRTTVIDNAGSVIQPPNDSVFNPSNLPAGINPANPLLALPNQLTNNFLGALSASIINNKTKLLTDPTLIIQEGERSEVKLTSQVVQKIESETTTNGSGPPTVSRTIDLADVGLQLTINIERIDDNGFITLTVLPAISSPQDVVTFGDPNTNGVLTTLIKKREVSSGKIRLRDSQTLILSGIIQDEERERVAKIPLLGDLPLIGSLFRTSYTDRQRREVVVVITPKILADTDATVFGYGYQPSPPAQSVLNNTLQTPTVAPLP

SEQ ID NO: 21440 - protein, 520 aa, Trametes hirsuta
MSRFQSLLAFVVASLAAVAHAAIGPTADLTISNAEVSPDGFARQAVVVNNVTPGPLVAGNKGDRFQLNVIDNLTNHTMLKSTSIHWHGFFQKGTNWADGPAFVNQCPISSGHSFLYDFQVPDQAGTFWYHSHLSTQYCDGLRGPFVVYDPNDPHASLYDVDNDDTVITLADWYHTAAKLGPAFPLGADATLINGLGRSPSTTAADLAVINVTKGKRYRFRLVSLSCDPNHTFSIDGHDLTIIEVDSINSQPLVVDSIQIFAAQRYSFVLNADQDVGNYWIRANPNFGNVGFAGGINSAILRYDGADPVEPTTTQTTPTKPLNEVDLHPLATMAVPGSPVAGGVDTAINMAFNFNGTNFFINGASFVPPTVPVLLQIISGAQNAQDLLPSGSVYSLPSNADIEISFPATAAAPGAPHPFHLHGHAFAVVRSAGSTVYNYDNPIFRDVVSTGTPAAGDNVTIRFRTDNPGPWFLHCHIDFHLEAGFAVVFAEDIPDVASANPVPQAWSDLCPIYDALDVNDQ

SEQ ID NO: 21441 - protein, 499 aa, Trametes maxima
AVGPVADNTITDAATSPDGFSRQAVVVNGVTPGPLVAGNIGDRFQLNVIDNLTNHTMLKTTSVHWHGFFQQGTNWADGPAFINQCPISPGHSFLYDFQVPNQAGTFWYHSHLSTQYCDGLRGPFVVYDPNDPHASRYDVDNDDTVITLADWYHTAAKLGPRFPAGADATLINGKGRAPSDTSAELSVIKVTKGKRYRFRLVSLSCDPNFTFSIDGHNLTIIEVDSSNSQPLSVDSIQIFAAQRYSFVLNANQAVDNYWIRANPNFGNVGFNGGINSAILRYDGAPAVEPTTNQTTSVKPLNEVNLHPLVSTPVPGSPSSGGVDKAINMAFNFNGSNFFINGASFVPPSVPVLLQILSGAQTAQDLLPSGSVYVLPSNASIEISFPATAAAPGAPHPFHLHGHTFAVVRSAGSTVYNYSNPIFRDVVSTGTPAAGDNVTIRFLTNNPGPWFLHCHIDFHLEGGFAVVQAEDVPDVKATNPVPQAWSDLCPTYDANAPSDQ

SEQ ID NO: 21442 - protein, 520 aa, Trametes villosa
MSRFHSLLAFVVASLTAVAHAGIGPVADLTITNAAVSPDGFSRQAVVVNGGTPGPLITGNMGDRFQLNVIDNLTNHTMVKSTSIHWHGFFQKGTNWADGPAFINQCPISSGHSFLYDFQVPDQAGTFWYHSHLSTQYCDGLRGPFVVYDPNDPAADLYDVDNDDTVITLVDWYHVAAKLGPAFPLGADATLINGKGRSPSTTTADLSVISVTPGKRYRFRLVSLSCDPNYTFSIDGHNMTIIETDSINTAPLVVDSIQIFAAQRYSFVLEANQAVDNYWIRANPNFGNVGFTGGINSAILRYDGAAAVEPTTTQTTSTAPLNEVNLHPLVTTAVPGSPVAGGVDLAINMAFNFNGTNFFINGTSFTPPTVPVLLQIISGAQNAQDLLPSGSVYSLPSNADIEISFPATAAAPGAPHPFHLHGHAFAVVRSAGSTVYNYDNPIFRDVVSTGTPAAGDNVTIRFRTDNPGPWFLHCHIDFHLEAGFAVVFAEDIPDVASANPVPQAWSDLCPTYDALDPSDQ

SEQ ID NO: 21443 - protein, 519 aa, Trametes versicolor
MGLQRFSFFVTLALVARSLAAIGPVASLVVANAPVSPDGFLRDAIVVNGVVPSPLITGKKGDRFQLNVDDTLTNHSMLKSTSIHWHGFFQAGTNWADGPAFVNQCPIASGHSFLYDFHVPDQAGTFWYHSHLSTQYCDGLRGPFVVYDPKDPHASRYDVDNESTVITLTDWYHTAARLGPRFPLGADATLINGLGRSASTPTAALAVINVQHGKRYRFRLVSISCDPNYTFSIDGHNLTVIEVDGINSQPLLVDSIQIFAAQRYSFVLNANQTVGNYWVRANPNFGTVGFAGGINSAILRYQGAPVAEPTTTQTTSVIPLIETNLHPLARMPVPGSPTPGGVDKALNLAFNFNGTNFFINNATFTPPTVPVLLQILSGAQTAQDLLPAGSVYPLPAHSTIEITLPATALAPGAPHPFHLHGHAFAVVRSAGSTTYNYNDPIFRDVVSTGTPAAGDNVTIRFQTDNPGPWFLHCHIDFHLDAGFAIVFAEDVADVKAANPVPKAWSDLCPIYDGLSEANQ

SEQ ID NO: 21444 - protein, 519 aa, Trametes villosa
MGLQRFSFFVTLALVARSLAAIGPVASLVVANAPVSPDGFLRDAIVVNGVVPSPLITGKKGDRFQLNVVDTLTNHSMLKSTSIHWHGFFQAGTNWAEGPAFVNQCPIASGHSFLYDFHVPDQAGTFWYHSHLSTQYCDGLRGPFVVYDPKDPHASRYDVDNESTVITLTDWYHTAARLGPKFPLGADATLINGLGRSASTPTAALAVINVQHGKRYRFRLVSISCDPNYTFSIDGHNLTVIEVDGINSQPLLVDSIQIFAAQRYSFVLNANQTVGNYWVRANPNFGTVGFAGGINSAILRYQGAPVAEPTTTQTPSVIPLIETNLHPLARMPVPGSPTPGGVDKALNLAFNFNGTNFFINNATFTPPTVPVLLQILSGAQTAQDLLPAGSVYPLPAHSTIEITLPATALAPGAPHPFHLHGHAFAVVRSAGSTTYNYNDPIFRDVVSTGTPAAGDNVTIRFQTDNPGPWFLHCHIDFHLDAGFAIVFAEDVADVKAANPVPKAWSDLCPIYDGLSEANQ

SEQ ID NO: 21445 - protein, 473 aa, Trametes villosa
MSFSSLRRALVFLGACSSALASIGPVTELDIVNKVIAPDGVARDTVLAGGTFPGPLITGKKGDNFRINVVDKLVNQTMLTSTTIHWHGMFQHTTNWADGPAFVTQCPITTGDDFLYNFRVPDQTGTYWYHSHLALQYCDGLRGPLVIYDPHDPQAYLYDVDDESTVITLADWYHTPAPLLPPAATLINGLGRWPGNPTADLAVIEVQHGKRYRFRLVSTSCDPNYNFTIDGHTMTIIEADGQNTQPHQVDGLQIFAAQRYSFVLNANQAVNNYWIRANPNRANTTGFANGINSAILRYKGAPIKEPTTNQTTIRNFLWETDLHPLTDPRAPGLPFKGGVDHALNLNLTFNGSEFFINDAPFVPPTVPVLLQILNGTLDANDLLPPGSVYNLPPDSTIELSIPGGVTGGPHPFHLHGTDNPGPWFLHCHIDFHLQAGLAIVFAEDAQDTKLVNPVPEDWNKLCPTFDKAMNITV

SEQ ID NO: 21446 - protein, 520 aa, Trametes versicolor
MGRFSSLCALTAVIHSFGRVSAAIGPVTDLTISNADVSPDGFTRAAVLANGVFPGPLITGNKGDNFQINVIDNLSNETMLKSTSIHWHGFFQKGTNWADGAAFVNQCPIATGNSFLYDFTATDQAGTFWYHSHLSTQYCDGLRGPMVVYDPSDPHADLYDVDDETTIITLSDWYHTAASLGAAFPIGSDSTLINGLGRFAGGDSTDLAVITVEQGKRYRMRLLSLSCDPNYVFSIDGHNMTIIEADAVNHEPLTVDSIQIYAGQRYSFVLTADQDIDNYFIRALPSAGTTSFDGGINSAILRYSGASEVDPTTTETTSVLPLDEANLVPLDSPAAPGDPNIGGVDYALNLDFNFDGTNFFINDVSFVSPTVPVLLQILSGTTSAADLLPSGSLFALPSNSTIEISFPITATNAPGAPHPFHLHGHTFSIVRTAGSTDTNFVNPVRRDVVNTGTAGDNVTIRFTTDNPGPWFLHCHIDFHLEAGFAIVFSEDTADVSNTTTPSTAWEDLCPTYNALDSSDL

SEQ ID NO: 21447 - protein, 520 aa, Trametes villosa
MGRFSSLCALTAVIHSFGRVSAAIGPVTDLTISNGDVSPDGFTRAAVLANGVFPGPLITGNKGDNFQINVIDNLSNETMLKSTSIHWHGFFQKGTNWADGAAFVNQCPIATGNSFLYDFTATDQAGTFWYHSHLSTQYCDGLRGPMVVYDPSDPHADLYDVDDETTIITLSDWYHTAASLGAAFPIGSDSTLINGLGRFAGGDSTDLAVITVEQGKRYRMRLLSLSCDPNYVFSIDGHNMTIIEADAVNHEPLTVDSIQIYAGQRYSFVLTADQDIDNYFIRALPSAGTTSFDGGINSAILRYSGASEVDPTTTETTSVLPLDEANLVPLDSPAAPGDPNIGGVDYALNLDFNFDGTNFFINDVSFVSPTVPVLLQILSGTTSAADLLPSGSLFAVPSNSTIEISFPITATNAPGAPHPFHLHGHTFSIVRTAGSTDTNFVNPVRRDVVNTGTVGDNVTIRFTTDNPGPWFLHCHIDFHLEAGFAIVFSEDTADVSNTTTPSTAWEDLCPTYNALDSSDL

SEQ ID NO: 21448 - protein, 527 aa, Trametes versicolor
MGKFHSFVNVVALSLSLSGRVFGAIGPVTDLTISNADVTPDGITRAAVLAGGVFPGPLITGNKGDEFQINVIDNLTNETMLKSTTIHWHGIFQAGTNWADGAAFVNQCPIATGNSFLYDFTVPDQAGTFWYHSHLSTQYCDGLRGPLVVYDPDDANASLYDVDDDTTVITLADWYHTAAKLGPAFPAGPDSVLINGLGRFSGDGGGATNLTVITVTQGKRYRFRLVSISCDPNFTFSIDGHNMTIIEVGGVNHEALDVDSIQIFAGQRYSFILNANQSIDNYWIRAIPNTGTTDTTGGVNSAILRYDTAEEIEPTTNATTSVIPLTETDLVPLDNPAAPGDPQVGGVDLAMSLDFSFNGSNFFINNETFVPPTVPVLLQILSGAQDAASLLPNGSVYTLPSNSTIEISFPIITTDGALNAPGAPHPFHLHGHTFSVVRSAGSSTFNYANPVRRDTVSTGNSGDNVTIRFTTDNPGPWFLHCHIDFHLDAGFAIVFAEDTADTASANPVPTAWSDLCPTYDALDSSDL

SEQ ID NO: 21449 - protein, 527 aa, Trametes villosa
MGKYHSFVNVVALSLSLSGRVFGAIGPVTDLTISNADVTPDGITRAAVLAGGVFPGPLITGNKGDEFQINVIDNLTNETMLKSTTIHWHGIFQAGTNWADGAAFVNQCPIATGNSFLYDFTVPDQAGTFWYHSHLSTQYCDGLRGPLVVYDPDDPNASLYDVDDDTTVITLADWYHTAAKLGPAFPAGPDSVLINGLGRFSGDGGGATNLTVITVTQGKRYRFRLVSISCDPNFTFSIDGHNMTIIEVDGVNHEALDVDSIQIFAGQRYSFILNANQSIDNYWIRAIPNTGTTDTTGGVNSAILRYDTAEDIEPTTNATTSVIPLTETDLVPLDNPAAPGDPQVGGVDLAMSLDFSFNGSNFFINNETFVPPTVPVLLQILSGAQDAASLLPNGSVYTLPSNSTIEISFPIITTDGVLNAPGAPHPFHLHGHTFSVVRSAGSSTFNYANPVRRDTVSTGNSGDNVTIRFTTDNPGPWFLHCHIDFHLEAGFAIVWGEDTADTASANPVPTAWSDLCPTYDALDSSDL

SEQ ID NO: 21450 - protein, 622 aa, Trametes hirsuta
MSASSSDPFHSFAKTSFTSKAAKRATAHSLPPLPGPGDLPPGMNVEYDVAIVGSGPIGCTYARELVEAGFNVAMFEIGEIDSGLKIGSHKKNTVEYQKNIDKFVNVIQGQLMPVSVPVNTMVVDTLSPASWQASTFFVRNGANPEQDPLRNLSGQAVTRVVGGMSTHWTCATPRFEKLQRPLLVKNDSKADDAEWDRLYKKAESYFKTGTTQFAESIRHNLVLKKLQEEYKGVRDFQQIPLAATRQSPTFVEWSSAHTVFDLENRPNKDAPKQRFNLFPAVACTNVRRDNANSEIVGLDVRDLHGGKSITIKAKVYILTAGAVHNAQLLAASGFGQLGRPDPAKPLPSLLPYLGTHITEQTLVFCQTVMSTELINSVTADMTIVGKPGHPDYSVTYTPGNPNNKHPDWWNEKVKKHMMDHQEDPLPIPFEDPEPQVTTLFQATHPWHTQIHRDAFSYGAVQQSIDSRLIVDWRFFGRTEPKEENKLWFSDKITDAYNLRQPTFDFRFPGGREAEDMMTDMCVMSAKIGGFLPGSYPQFMEPGLVLHLGGTHRMGFDEKADKCCVDTDSRVFGFKNLFLGGCGNIPTAYAANPTLTAMSLAIKSCEYIKKNFEPSPNPVKHHN

SEQ ID NO: 21451 - protein, 622 aa, Trametes pubescens
MSTSSSDPFYNFAKTSFKSAAAQKASATSLPPLPGPDQKVPGMDIKYDVVIVGSGPIGCTYARELVEAGYKVAMFDIGEIDSGLKIGAHKKNTVEYQKNIDKFVNVIQGQLMSVSVPVNKLVVDTLSPTSWQASTFFVRNGSNPEQDPLRNLSGQAVTRVVGGMSTHWTCATPRFDREQRPLLVKDDPDADDAIWDQLYTKAESYFKTGTDQFNESIRHNLVLNKLAEEYKGQRTFQQIPLAATRRNPTFVEWSSANTVFDLQNRPNIDAPEERFNLFPAVACERVMRNASNTAIESLHIRDLISGDRFAIQADVYVLTAGAVHNTQLLVNSGFGKLGRPDPANPPELLPFLGSYITEQSLVFCQTVMSTELIDSVKSDMTIIGNPGELGYSVSYMPGASTNKHPDWWNEKVQNHMMQHQEDPLPIPFEDPEPQVTTLFQPSHPWHTQIHRDAFSYGAVQQSIDSRLIVDWRFFGRTEPKEENKLWFSDKITDAYNMPQPTFDFRFPAGRTSQEAEDMMTDMCVMSAKIGGFLPGSLPQFMEPGLVLHLGGTHRMGFDEQEDNCCVDTDSRVFGFNNLFLGGCGNIPTAYGANPTLTAMSLAIKSCEYIKKNFTPSPFTPAQ

SEQ ID NO: 21452 - protein, 623 aa, Trametes versicolor
MSTSSSDPFFNFTKSSFRSAAAQKASATSLPPLPGPDKKVPGMDIKYDVVIVGSGPIGCTYARELVEAGYKVAMFDIGEIDSGLKIGAHKKNTVEYQKNIDKFVNVIQGQLMSVSVPVNTLVIDTLSPTSWQASSFFVRNGSNPEQDPLRNLSGQAVTRVVGGMSTHWTCATPRFDREQRPLLVKDDQDADDAEWDRLYTKAESYFKTGTDQFKESIRHNLVLNKLAEEYKGQRDFQQIPLAATRRSPTFVEWSSANTVFDLQNRPNTDAPNERFNLFPAVACERVVRNTSNSEIESLHIHDLISGDRFEIKADVFVLTAGAVHNAQLLVNSGFGQLGRPDPANPPQLLPSLGSYITEQSLVFCQTVMSTELIDSVKSDMIIRGNPGDLGYSVTYTPGAETNKHPDWWNEKVKNHMMQHQEDPLPIPFEDPEPQVTTLFQPSHPWHTQIHRDAFSYGAVQQSIDSRLIVDWRFFGRTEPKEENKLWFSDKITDTYNMPQPTFDFRFPAGRTSKEAEDMMTDMCVMSAKIGGFLPGSLPQFMEPGLVLHLGGTHRMGFDEQEDKCCVNTDSRVFGFKNLFLGGCGNIPTAYGANPTLTAMSLAIKSCEYIKNNFTPSPFTDQAE

SEQ ID NO: 21453 - protein, 384 aa, Trametes hirsuta
MKAILSLAAALLSAAPAFSTAVWGQCGGIGFSGDTTCTASTCVKVNDYYSQCQPGASAPTSTASAPGPSACPGSRTKFKLFGVNESGAEFGNNVIPGALGTDYTWPSPTSIDFFLDQGFNTFRIPFLMERVSPPSTGGLTGPFNNTYLDGLKQTVSYITGKGGFAIIDPHNFMIFNGATITSTSQFQAWWQKLAAEFKTNNNVIFDLMNEPHDIPAQTVFQLMQAAVNGVRASGATSQLILVEGTSWTGAWTWTTSGNSDAFGAITDPNNNVAIQMHQYLDSDGSGTSPTCVSSTIGAERLQAATQWLQQKGLKGFLGEIGTGNNTQCVTALQGALCEMQQAGGTWLGALWWAAGPWWGDYYQSIEPPNGDAITNILPALKAFL

SEQ ID NO: 21454 - protein, 436 aa, Trametes versicolor
MFKFAAAGQCGGVGWTGRTTCVSGSVCSKQNDYYSQCISGAGAPGTTVAPTTAPTAPATSAPGGSPTTVSAPSTPSSTPAAGNPFTGFQVYLSPYYSAEIASAAAAVTDSSLKAKAASVANIPTFTWLDSVAKVPDLGTYLADASSIQTKTGQKQLVPIVVYELPDRDCAAKASNGEFSIADAGAENYKDYIDQIVPQIKQFPDVRVVAVIEPDSLANLVTNLNVQKCANGGTYKASVTYALQQLSSVGVTMYMDAGHAGWLGWPANIQPGSEVFAEMFKSADFVAFVRAFATNVREYNALTAAFPRPITQGNPNYDEFPYIQRVRPMLKSPGFPAQFVVDQGRAGQQNFRQQWGDWCNIKGAGFGTRPTTSTGNPLIDAIIWVKPGGESDGTSNSSSPRYDSTLLSVRRDDPAPEAGTWFQAYFETLVSKPTRPL

SEQ ID NO: 21455 - protein, 746 aa, Hypocrea jecorina
MLGAPSPRRLADVLAVTAGLVASVRAASPISVSGKSFALNGDNVSYRFHVDDDSKDLIGDHFGGPATEDGVFPPIIGPIQGWVDLIGRQRREFPDLGRGDFRTPAVHIRQAAGYTVSDFQYKSHRVVEGKPALRGLPSTFGDAGDVSTLVVHMYDNYSSVAADLTYSIFPKYDAIVRSVNITNMGKGNITIEKLASLSVDLPYEDFDMLELKGDWAREGKRLRRKVDYGSQGFGSTTGYSSHLHNPFFSLITPTTTESQGEAWGFSLVYTGSFSVEVEKGSQGLTRAAIGVNPYQLSWPLGPGETFSSPEAVAVFSTTGVGGMSRKFHNLYRKHLIKSKFATQMHPVLLNSWEGLGFDYNDTTILHLAQESADLGIKLFVLDDGWFGVKHPRVSDNAGLGDWEANPKRFPQGLPDFISDVTKLKVANSSDHLQFGLWFEPEMVNPNSTLYMEHPDWAIHAGSYPRTLTRNQLVLNVALPEVQDFIIESLSNILSNASISYVKWDNNRGIHEAPYPGLDYAYMLGLYRVFDTLSSKFPNVRWEGCASGGGRFDPGVLQYFPHIWTSDDTDAVERIAIQFGTSLVYPPSAMGAHVSAVPNGQTQRTTSIAFRAHVAMMGGSFGFELTPAEMPEDDKAQIPGIIALAEKVNPIVVKGDMWRLSLPEESNWPAALFISQDGSQAVLFYFQIRANINNAWPVLRLQGLDASAKYKIDGNQTFSGATLMNIGLQYQFNGDYDSKVVFLEKQT

SEQ ID NO: 21456 - protein, 624 aa, Hypocrea jecorina
MSPSAAVLIPLAAAVLLRPVVGQTQCGGNLYTPGTLNFTLECYNAFQDCVAQFEANASQVDCNDGKGNLFMQQQANLGASPGSQNNDAIIAFQDIRDLCLLSGSTTATWGYSDNQWYWAAAEDACYTNDPTRTDVVKTHPAPFCIQNRDSSLPECYPQPDATPPGGPLKVIKTAKTRNGFKSSARGWNTYGVQALVNGSQVVPSFAGQSGLFYTQKFVETQCGVLARPEFKKAGYDLCSLDSGWQATTAVDQHGRIIYNTTRFNLPELASWLHKRDLKLGVYITPGVPCLAHNQTILGTNIKIKDVLNGNNDQINCDFDFRKDGVQQWHDSVVAQWASWGVDMLKLDFLTPGSPSNGANLACDSSDAVRAYQKAIKKSGRKIRLDISWKLCRNETWLPIWSDLAESMRTDQDLDNYGTNTLMAWQVGQRAIENYRQYIGLQAQRNVPLTIYPDMDALFTVNPEHLAGVNDTIRYTVQNHWLGAGANLIIGGDMEQVDALGLKLTTSKQSIDAADFFAKYPMQPRNPGTGSNAAKQLQAWIGGPSDDHEAYVLIVNYGPDLGNGGFSTKLYGKQKVTVSLKDLGISGSAWTFTDIWSGKSSRVTGSYSAWLTEGESQLLRLKRTH

SEQ ID NO: 21457 - protein, 847 aa, Hypocrea jecorina
MVIRSLLLLLLAAIVPVFAESGIDAWLRYARLPSSATRGHLTSFPDRIVVLNASKNGPLASASSELHKGIKGILGLDLDVSSRGGKHCSTQKSIVISTLDTYQSACGKLSPKLNLKEDGYWLSTKGGSVQIIGQNERGALYGAFQYLSYLGQGDFSGKAFASNPSAPVRWSNQWDNLNAATAAHGSIERGYGGPSIFFENGLIKEDLSRVPLYGRLLASVGLNGIVINNVNADANLLNETNLQGLKRIADLFRPWGVNVGISLNFASPQVLGDLSTFDPLDDSVIKWWTDKTDRIYQLVPDLAGYLVKANSEGQPGPLTYNRTLAEGANLFAKAVQPHGGIVVFRAFVYDQLNETDWKADRANAAVDFFKSLDGQFDDNVLVQIKYGPIDFQVREPASPLFANLPKTAVSIELEVTQEYLGQQSHLVYLPPLWQTVLGFDMRYNNRQSYVRDIISGEVFGHKLGGYAGVINVGMDDTWLGSHLAMSNMFAYGRLAWNPRADSRDIVEEWTRLTFGLDRDVVSTIADMSLKSWPAYEGYSGNLGIQTLTDILYTHYGANPASQDNNGWGQWTRADSKTIGMDRTVSNGTGNAGQYPKEVAARFEHTQTTPDDLMLWFHHVPYTFRLHSGKSVIQHFYDAHYTGAATVQRFPAAWKSLKSKIDTERYNAVLYKLQYQTGHSLVWRDAITEFYRNLSSIPDQLNRVRNHPHRIEAEDMDLSGFTVVNVSPTECASKYKAIATNGTGTATTRLNVPSGKYTVAVNYYDVINGTASYDVLLNGKSLGKWKGDSETHLGHDFSTFLDCHSAIRITFEGVRISRGDKLTIRGTGNAQEQAAIDYVSILPQGVVD

SEQ ID NO: 21458 - protein, 409 aa, Hypocrea atroviridis
MTSIRRLALYLGALLPAVLAAPAALHKKPEAVPNKFIVTLKEGASIDTDSHLAWVTDIHTRSLTKRSTAGVEKTYNIHTWNAYAGEFDEETIEQIKSNPDVASVEPDYIMHLSDIVEDKRALTTQSGAPWGLGTVSHRTSGSTSYIYDSSAGAGTFAYVVDSGINTSHQQFGGRASLGYNAAGGQHVDTLGHGTHVSGTIGGSTYGVAKQASLISVKVFAGESASTSVILDGYNWAVNDIVSKSRASKSAINMSLGGPASSTWTTAINAAFNQGVLTIVAAGNGDSLGNPQPVSGTSPANVPNAITVAALDINWRTASFTNYGAGVDVFAPGVNILSSWIGSNTATNTISGTSMATPHVVGLALYLQSLEGLTSPTAVTNRIKALATSGRVTGSLNGSPNVIIFNGNSS

SEQ ID NO: 21459 - protein, 302 aa, Hypocrea jecorina
MPSVKETLTLLLSQAFLATGSPVDGETVVKRQCPAIHVFGARETTVSQGYGSSATVVNLVIQAHPGTTSEAIVYPACGGQASCGGISYANSVVNGTNAAAAAINNFHNSCPDTQLVLVGYSQGAQIFDNALCGGGDPGEGITNTAVPLTAGAVSAVKAAIFMGDPRNIHGLPYNVGTCTTQGFDARPAGFVCPSASKIKSYCDAADPYCCTGNDPNVHQGYGQEYGQQALAFINSQLSSGGSQPPGGGPTSTSRPTSTRTGSSPGPTQTHWGQCGGQGWTGPTQCESGTTCQVISQWYSQCL

SEQ ID NO: 21460 - protein, 423 aa, Trichoderma harzianum
MLSFLGKSVALLAALQATLSSPKPGHRRASVEKRANGYANSVYFTNWGIYDRNFQPADLVASDVTHVIYSFMNLQADGTVISGDTYADYEKHYADDSWNDVGTNAYGCVKQLFKVKKANRGLKVLLSIGGWTWSTNFPSAASTDANRKNFAKTAITFMKDWGFDGIDIDWEYPADATQASNMILLLKEVRSQRDAYAAQYAPGYHFLLTIAAPAGKDNYSKLRLADLGQVLDYINLMAYDYAGSFSPLTGHDANLFNNPSNPNATPFNTDSAVKDYINGGVPANKIVLGMPIYGRSFQNTAGIGQTYNGVGSGSWEAGIWDYKALPKAGATVQYDSVAKGYYSYNSATKELISFDTPDMINTKVAYLKSLGLGGSMFWEASADKKGADSVIGTSHRALGGLDTTQNLLSYPNSKYDNIKNGLN

SEQ ID NO: 21461 - protein, 762 aa, Trichoderma harzianum
MLKLTALVALLLGAASATPTPSPPASDEGITKRATSFYYPNMDHVNAPRGFAPDLDGDFNYPIYQTVNAGDGNALQNAITTDGKGGSRHPQWFASQPRVVYIPPGTYTISKTLRFNTDTILMGDPTNPPIIKAAAGFSGDQTLISAQDPSTNEKGELSFAVAIKNVVLDTTAIPGGNSFTALWWGVAQAAHLQNVRITMSSSSGGNGHTGIRMGRGSTLGLADVRVERGQNGIWIDGHQQASFHNIYFFQNTIGMLISSGNTFSIFSSTFDTCGTAFPTLAGSPWIALIDAKSINSGVTFTTNQFPSFMIENLTKDNGTPVVVVRGSTLVGASSHVNTYSYGNTVGRNPTYGDVTSSNTRPSALAPGGRYPYVAPPTYGDLPISSFLNVKDPAQNGNRQVKGDNTINEADTLNAILELAASQNKVAYFPFGKYRVDSTLFIPKGSRIVGEAWATITGNGNFFKNENSPQPVVSVGRAGDVGIAQLQDLRVTTNDVLPGAILVQFNMAGNNPGDVALWNSLVTVGGTRGAQALANACTNNSNECKGAFIGIHVAKGSSPYIQNVWELGLRDHIAENFSGGTSHRRERWNFGPIRRNATCLYPIGSGHWWLYQLNLHNAANVVVSLLQAETNYHQGANTQQIPPAPWVANVGTWGDPDFSWCNGGDKRCRMGPANFINGGSNIYTYASAAWAFFSGPGQGCAQFECQQTIHWIASTPSNLQAFGLCSKDSVNTLRLGDGTFINTQNGYTGGWTPGGGDVARYTT

SEQ ID NO: 21462 - protein, 892 aa, Hypocrea jecorina
MLANAIAALLLGSGIASAAGHGSPLTSKAGHRAVIPDWDLKSSSDVSKDLGGLSKPGVDTSSWYHAGTSRCTIMGCLINAGVYNDEELWYSDNLNHVNWGQFSVPWVYRHEFALSPAKGKHFLLQTNGITSKADLFFNGKQIADKEYQSGAYAGRTYDITNLAAKKNALLVQVYPTDYLYDFALGYVDWNPYPSDNGSGIWRDITIKETGSVSMGPVSVLVDIDVPVEKNPARVTVRAEAQNLESHAVEFNAAAVISGNSCSGEALKQTIKLAPGEKKLVQFTQTIKTPSIWWPKQWGDQPLYTAEVTFSVKGAVSDTAQTKFGVRKVTSFVNQFNDTQYSVNGHPFQVIGGGYGADMFLRWDSERFTRIVEYMLDMHQNTIRLEGKMEHPELYEICDEYGLMVMPGWECCDKWEAWAYNDELAIFPPPVWDANDYETANYSMIHEAAMMQPHPSVLTFLVGSDFWPNDEAVVLYANALKNAGWQTPIIASASKRGFPALLGPGGMKMDGPYDWVPPNYWYDVEPSEDRLGAAFGFGSELGAGVGTPELSSLRRFLNQSDLDDLWKNPNKNLFHMSTNASSFYNRKIYNQGLWKRYGAPTSLDDYLLKAQMMDYEATRAQYEGFGALWTASRPATGVIYWMLNNAWPSLHWNQFDYYLHPAGSYFGTKVGSRIEHVAYNYQKKEIWVINHSLYQTGSRNIKVELIDMNGKQIAKKLVQVRTKANSGFKAMDISSDINKLSSVAFLRLVLSDEKGSVLSRNVYWVTKTIDELNWDESTWYYTPVSKFVDYTPLNTLATAQVSVTTSGGKHLPGIPGSQTRTVTLENKSSVPAVFIRLTLVDSKGNDVNPVSWSDNYVTLWPHEKLQLEVGGWDGSGDKIQISGKNIKATTVKL

SEQ ID NO: 21463 - protein, 890 aa, Hypocrea virens
MIAKAVAALLLGSGLASAAGTPLTSKAGDKVPIPDWDLKSSSEVSKDLKGLSKPGVDTSAWYHAGTSKCTLMACLLNAGIYKDEDLWYSDNLNHFNWGQFSIPWLYRHEFALAPAKGKHFILQTNGITSKADLFFNGQQIADSEYQAGAYAGRTYDITSLAAKDNAFVVQVHPTDYLYDFALGYVDWNPYPPDNGTGIWRDITVKETGSVSMGPISVVVDIDVPVESSPAKVTIRAEAQNLENVAVVLDAEAVVSGNSCSGGPLKQTVKLAPGEKKLVEFTKTIAKPKIWWPKQWGDQPLYNAKVTFSVNKAVSDTAQTNFGVRKVTSFVNQYNDTQYSVNGHPFQVVGGGYGADMFLRWDGDRFTRIVEYMLDMHQNTIRLEGKMEHPELYEICDKYGLMVMPGWECCDKWEAWAYNDELAIFPPPVWDDNDYQTANYSMIHEASMLQPHPSVLTFLVGSDFWPNDEAVVLYVNALKNAGWQTPIIASASKRGFPALLGPGGMKMDGPYDWVPPNYWYDTEPSEDRLGAAFGFGSELGAGVGTPELGSLKRFLSQSDLNDLWKNPNKNLYHMSTNVSSFYNRKIYNQGLFKRYGAPTSLDDYLLKAQMMDYEATRAQYEGFSSLWTASRPATGNIYWMLNNAWPSLHWNQFGYYMHPAGSYFGTKVGSRIEHVAYNYQKKEVWVINHSLDQTGPRKVDIELIDTNGKQIAKQSVNINTKANSGFKAADISSQIGKLSSVAFLRLILSDSKGNVLSRNVYWVTNSIDKLDWDSSTWYYTQVTSFVDYTPLNKLSAAQISVTTGSSRRVAGVPGTQTRTVTLENKPSVPAVFIRLTLVDKSGNDVNPVSWTDNYVTLWPKEKLQLEVGGWDASGDSIQVSGRNIAATTVKL

SEQ ID NO: 21464 - protein, 490 aa, Trichoderma harzianum
MRYALIASMLGQAAISVAMPSEPAHSPRAAGAQAYASNQAGNYKLTSIAAPVQGNGSPGPSTWNLSIDDTSSGYKQKIVGFGAAVTDATVSAFNELSASTLSQLLDELMTGAGASFSLMRHTIGASDLSGDPAYTYDDNGGNADPGMTGFNLGDRGTAMATMLAQMKGLNSNLQIFGSPWSAPGWMKLNNAIDGNTNNNNLNDGYLTNNGAQYSAAFAQYFVKYIQAFESHGATINAITLQNEPLNSQAGYPTMYMFSYEQGDLIQNYVAPALKAAGLSTKIWAYDHNTDQPDFPEQVMGIAADDVSAVAWHCYATNLDWTVLTNFHNSYPNTDQYMTECWTPSTGAWNQAASFTMGPLQNWARGVAAWTLGTTAQDGPHLSSGGCGTCTGLVTINNGQYTFQTAYYMMAQFSKFMPVGATVLSGTGSYTYSGSGGVQSVASLNPDGTRTVVIENTFGNDIYIHLSTSSGQEWSGNVPTNSVTTWVLPAV

SEQ ID NO: 21465 - protein, 459 aa, Hypocrea jecorina
MAPSVTLPLTTAILAIARLVAAQQPGTSTPEVHPKLTTYKCTKSGGCVAQDTSVVLDWNYRWMHDANYNSCTVNGGVNTTLCPDEATCGKNCFIEGVDYAASGVTTSGSSLTMNQYMPSSSGGYSSVSPRLYLLDSDGEYVMLKLNGQELSFDVDLSALPCGENGSLYLSQMDENGGANQYNTAGANYGSGYCDAQCPVQTWRNGTLNTSHQGFCCNEMDILEGNSRANALTPHSCTATACDSAGCGFNPYGSGYKSYYGPGDTVDTSKTFTIITQFNTDNGSPSGNLVSITRKYQQNGVDIPSAQPGGDTISSCPSASAYGGLATMGKALSSGMVLVFSIWNDNSQYMNWLDSGNAGPCSSTEGNPSNILANNPNTHVVFSNIRWGDIGSTTNSTAPPPPPASSTTFSTTRRSSTTSSSPSCTQTHWGQCGGIGYSGCKTCTSGTTCQYSNDYYSQCL

SEQ ID NO: 21466 - protein, 463 aa, Trichoderma longibrachiatum
MAPSATLPLTTAILAIGRLVAAQQPGTSTPEVHPKLTTYKCTTSGGCVAQDTSVVLDWNYRWMHDANYNSCTVNGGVNTTLCPDEATCGKNCYIEGVDYAASGVTASGSTLTLNQYMPSSSGGYSSVSPRLYLLGPDGEYVMLKLNGQELSFDVDLSALPCGENGSLYLSQMDENGGANQYNTAGANYGSGYCDAQCPVQTWRNGTLNTSGQGFCCNEMDILEGNSRANALTPHSCTATACDSAGCGFNPYGSGYPNYFGPGDTVDTSKTFTIITQFNTDNGSPSGNLVSITRKYRQNGVDIPSAKPGGDTISSCPSASAYGGLATMGKALSSGMVLVFSIWNDNSQYMNWLDSGRAGPCSSTEGNPSNILANNPGTHVVYSNIRWGDIGSTTNSTGGNPPPPPPPASSTTFSTTRRSSTTSSSPSCTQTHWGQCGGIGYTGCKTCTSGTTCQYGNDYYSQCL

SEQ ID NO: 21467 - protein, 15 aa, Trichoderma viride
SYPNKQPYGPSGFWM

SEQ ID NO: 21468 - protein, 418 aa, Hypocrea jecorina
MNKSVAPLLLAASILYGGAVAQQTVWGQCGGIGWSGPTNCAPGSACSTLNPYYAQCIPGATTITTSTRPPSGPTTTTRATSTSSSTPPTSSGVRFAGVNIAGFDFGCTTDGTCVTSKVYPPLKNFTGSNNYPDGIGQMQHFVNEDGMTIFRLPVGWQYLVNNNLGGNLDSTSISKYDQLVQGCLSLGAYCIVDIHNYARWNGGIIGQGGPTNAQFTSLWSQLASKYASQSRVWFGIMNEPHDVNINTWAATVQEVVTAIRNAGATSQFISLPGNDWQSAGAFISDGSAAALSQVTNPDGSTTNLIFDVHKYLDSDNSGTHAECTTNNIDGAFSPLATWLRQNNRQAILTETGGGNVQSCIQDMCQQIQYLNQNSDVYLGYVGWGAGSFDSTYVLTETPTSSGNSWTDTSLVSSCLARK

SEQ ID NO: 21469 - protein, 344 aa, Hypocrea jecorina
MIQKLSNLLVTALAVATGVVGHGHINDIVINGVWYQAYDPTTFPYESNPPIVVGWTAADLDNGFVSPDAYQNPDIICHKNATNAKGHASVKAGDTILFQWVPVPWPHPGPIVDYLANCNGDCETVDKTTLEFFKIDGVGLLSGGDPGTWASDVLISNNNTWVVKIPDNLAPGNYVLRHEIIALHSAGQANGAQNYPQCFNIAVSGSGSLQPSGVLGTDLYHATDPGVLINIYTSPLNYIIPGPTVVSGLPTSVAQGSSAATATASATVPGGGSGPTSRTTTTARTTQASSRPSSTPPATTSAPAGGPTQTLYGQCGGSGYSGPTRCAPPATCSTLNPYYAQCLN

SEQ ID NO: 21470 - protein, 242 aa, Hypocrea jecorina
MKATLVLGSLIVGAVSAYKATTTRYYDGQEGACGCGSSSGAFPWQLGIGNGVYTAAGSQALFDTAGASWCGAGCGKCYQLTSTGQAPCSSCGTGGAAGQSIIVMVTNLCPNNGNAQWCPVVGGTNQYGYSYHFDIMAQNEIFGDNVVVDFEPIACPGQAASDWGTCLCVGQQETDPTPVLGNDTGSTPPGSSPPATSSSPPSGGGQQTLYGQCGGAGWTGPTTCQAPGTCKVQNQWYSQCLP

SEQ ID NO: 21471 - protein, 249 aa, Hypocrea jecorina
MKSCAILAALGCLAGSVLGHGQVQNFTINGQYNQGFILDYYYQKQNTGHFPNVAGWYAEDLDLGFISPDQYTTPDIVCHKNAAPGAISATAAAGSNIVFQWGPGVWPHPYGPIVTYVVECSGSCTTVNKNNLRWVKIQEAGINYNTQVWAQQDLINQGNKWTVKIPSSLRPGNYVFRHELLAAHGASSANGMQNYPQCVNIAVTGSGTKALPAGTPATQLYKPTDPGILFNPYTTITSYTIPGPALWQG

SEQ ID NO: 21472 - protein, 513 aa, Hypocrea jecorina
MYRKLAVISAFLATARAQSACTLQSETHPPLTWQKCSSGGTCTQQTGSVVIDANWRWTHATNSSTNCYDGNTWSSTLCPDNETCAKNCCLDGAAYASTYGVTTSGNSLSIGFVTQSAQKNVGARLYLMASDTTYQEFTLLGNEFSFDVDVSQLPCGLNGALYFVSMDADGGVSKYPTNTAGAKYGTGYCDSQCPRDLKFINGQANVEGWEPSSNNANTGIGGHGSCCSEMDIWEANSISEALTPHPCTTVGQEICEGDGCGGTYSDNRYGGTCDPDGCDWNPYRLGNTSFYGPGSSFTLDTTKKLTVVTQFETSGAINRYYVQNGVTFQQPNAELGSYSGNELNDDYCTAEEAEFGGSSFSDKGGLTQFKKATSGGMVLVMSLWDDYYANMLWLDSTYPTNETSSTPGAVRGSCSTSSGVPAQVESQSPNAKVTFSNIKFGPIGSTGNPSGGNPPGGNRGTTTTRRPATTTGSSPGPTQSHYGQCGGIGYSGPTVCASGTTCQVLNPYYSQCL

SEQ ID NO: 21473 - protein, 505 aa, Trichoderma harzianum
MYRKLAVISAFLAAARAQQVCTQQAETHPPLTWQKCTASGCTPQQGSVVLDANWRWTHDTKSTTNCYDGNTWSSTLCPDDATCAKNCCLDGANYSGTYGVTTSGDALTLQFVTASNVGSRLYLMANDSTYQEFTLSGNEFSFDVDVSQLPCGLNGALYFVSMDADGGQSKYPGNAAGAKYGTGYCDSQCPRDLKFINGQANVEGWEPSSNNANTGVGGHGSCCSEMDIWEANSISEALTPHPCETVGQTMCSGDSCGGTYSNDRYGGTCDPDGCDWNPYRLGNTSFYGPGSSFALDTTKKLTVVTQFATDGSISRYYVQNGVKFQQPNAQVGSYSGNTINTDYCAAEQTAFGGTSFTDKGGLAQINKAFQGGMVLVMSLWDDYAVNMLWLDSTYPTNATASTPGAKRGSCSTSSGVPAQVEAQSPNSKVIYSNIRFGPIGSTGGNTGSNPPGTSTTRAPPSSTGSSPTATQTHYGQCGGTGWTGPTRCASGYTCQVLNPFYSQCL

SEQ ID NO: 21474 - protein, 513 aa, Trichoderma koningii; identical to SEQ ID NO: 21472

SEQ ID NO: 21475 - protein, 514 aa, Trichoderma viride
MYQKLALISAFLATARAQSACTLQAETHPPLTWQKCSSGGTCTQQTGSVVIDANWRWTHATNSSTNCYDGNTWSSTLCPDNETCAKNCCLDGAAYASTYGVTTSADSLSIGFVTQSAQKNVGARLYLMASDTTYQEFTLLGNEFSFDVDVSQLPCGLNGALYFVSMDADGGVSKYPTNTAGAKYGTGYCDSQCPRDLKFINGQANVEGWEPSSNNANTGIGGHGSCCSEMDIWEANSISEALTPHPCTTVGQEICDGDSCGGTYSGDRYGGTCDPDGCDWNPYRLGNTSFYGPGSSFTLDTTKKLTVVTQFETSGAINRYYVQNGVTFQQPNAELGDYSGNSLDDDYCAAEEAEFGGSSFSDKGGLTQFKKATSGGMVLVMSLWDDYYANMLWLDSTYPTNETSSTPGAVRGSCSTSSGVPAQLESNSPNAKVVYSNIKFGPIGSTGNSSGGNPPGGNPPGTTTTRRPATSTGSSPGPTQTHYGQCGGIGYSGPTVCASGSTCQVLNPYYSQCL

SEQ ID NO: 21476 - protein, 471 aa, Hypocrea jecorina
MIVGILTTLATLATLAASVPLEERQACSSVWGQCGGQNWSGPTCCASGSTCVYSNDYYSQCLPGAASSSSSTRAASTTSRVSPTTSRSSSATPPPGSTTTRVPPVGSGTATYSGNPFVGVTPWANAYYASEVSSLAIPSLTGAMATAAAAVAKVPSFMWLDTLDKTPLMEQTLADIRTANKNGGNYAGQFVVYDLPDRDCAALASNGEYSIADGGVAKYKNYIDTIRQIVVEYSDIRTLLVIEPDSLANLVTNLGTPKCANAQSAYLECINYAVTQLNLPNVAMYLDAGHAGWLGWPANQDPAAQLFANVYKNASSPRALRGLATNVANYNGWNITSPPSYTQGNAVYNEKLYIHAIGPLLANHGWSNAFFITDQGRSGKQPTGQQQWGDWCNVIGTGFGIRPSANTGDSLLDSFVWVKPGGECDGTSDSSAPRFDSHCALPDALQPAPQAGAWFQAYFVQLLTNANPSFL

SEQ ID NO: 21477 - protein, 97 aa, Hypocrea jecorina
MKFFAIAALFAAAAVAQPLEDRSNGNGNVCPPGLFSNPQCCATQVLGLIGLDCKVPSQNVYDGTDFRNVCAKTGAQPLCCVAPVAGQALLCQTAVGA

SEQ ID NO: 21478 - protein, 86 aa, Hypocrea jecorina
MQFFAVALFATSALAAVCPTGLFSNPLCCATNVLDLIGVDCKTPTIAVDTGAIFQAHCASKGSKPLCCVAPVADQALLCQKAIGTF

SEQ ID NO: 21479 - protein, 398 aa, Trichoderma harzianum
MKFLQTSLIAAALPAALVSGRFVIENEGDNVQLDEPAKYLIELSPGETQWVTEEDKWDLRRNGQNFMDITDTQELGTLRAWTQSQASVAFPDKCVKQKEVGELAGHLTKDGMRRNLEKLTSFHTRYYKSDYGRQSSEWVLERINGIIKDAGAEDTVTAEHFGHSWPQSSVIARIPGKTNTTVIIGAHQDSINLWLPSILGAPGADDDGSGTVTIMEVFHTLLKAKDVVGGSAPNTVEFHWYSAEEGGLLGSQAIFQSYEKEGRDVKAMLQQDMTGFVQGTEDAGKPESVGVITDFVHPGLTAFIKKVIEEYCSIPWVETKCGYACSDHASASKAGYPSAFVIESAFENSDQHIHGTDDLIKYLSFDHMLEHAKMTLGLVYELAYHDFSSKAVEEPSEL

SEQ ID NO: 21480 - protein, 143 aa, Trichoderma harzianum
MKFLTVAAVFFTAVLAAPGNYPPPPPPTYAPPPPTYTLPPNGNGGGNGNGNGNGNGGGNGNGNGNTNTGGSALCPAGLYSNPQSCATDVLGLADLDCAVPSTTPHDGPNFQSICVANGGKRARCCVLPVLGLGVLCQNPVGTN

SEQ ID NO: 21481 - protein, 838 aa, Hypocrea jecorina
MKVSRVLALVLGAVIPAHAAFSWKNVKLGGGGGFVPGIIFHPKTKGVAYARTDIGGLYRLNADDSWTAVTDGIADNAGWHNWGIDAVALDPQDDQKVYAAVGMYTNSWDPSNGAIIRSSDRGATWSFTNLPFKVGGNMPGRGAGERLAVDPANSNIIYFGARSGNGLWKSTDGGVTFSKVSSFTATGTYIPDPSDSNGYNSDKQGLMWVTFDSTSSTTGGATSRIFVGTADNITASVYVSTNAGSTWSAVPGQPGKYFPHKAKLQPAEKALYLTYSDGTGPYDGTLGSVWRYDIAGGTWKDITPVSGSDLYFGFGGLGLDLQKPGTLVVASLNSWWPDAQLFRSTDSGTTWSPIWAWASYPTETYYYSISTPKAPWIKNNFIDVTSESPSDGLIKRLGWMIESLEIDPTDSNHWLYGTGMTIFGGHDLTNWDTRHNVSIQSLADGIEEFSVQDLASAPGGSELLAAVGDDNGFTFASRNDLGTSPQTVWATPTWATSTSVDYAGNSVKSVVRVGNTAGTQQVAISSDGGATWSIDYAADTSMNGGTVAYSADGDTILWSTASSGVQRSQFQGSFASVSSLPAGAVIASDKKTNSVFYAGSGSTFYVSKDTGSSFTRGPKLGSAGTIRDIAAHPTTAGTLYVSTDVGIFRSTDSGTTFGQVSTALTNTYQIALGVGSGSNWNLYAFGTGPSGARLYASGDSGASWTDIQGSQGFGSIDSTKVAGSGSTAGQVYVGTNGRGVFYAQGTVGGGTGGTSSSTKQSSSSTSSASSSTTLRSSVVSTTRASTVTSSRTSSAAGPTGSGVAGHYAQCGGIGWTGPTQCVAPYVCQKQNDYYYQCV

SEQ ID NO: 21482 - protein, 397 aa, Hypocrea virens
MPSLSFTAALGLLSLLPAAQAGWNQNSNNNIVVYWGQNSGSVGQNRLSYYCQNAPDVDVINISFMVGITNLNLNLANVGNNCTSFPQAPNLLNCPQVAADIVECQQTYGKTIMMSLFGSTYSESGFSSSSAAVSAAQEIWAMYGPVQSGNSTPRPFGNAVVDGFDFDLEDPIENNMEPFAAELKTLMNANTSKKFYLSAAPQCPYPDVSDQSFLNGQVAFDWVNVQFYNNGCGVSHYPTDFNWATWDNWAKTVSANKNAKVLIGTPANVGGANAGSFPTDSQLSGAINLAKGSSSFGGVMLWDMAQLFSNTGYLAKIVADLGGSSSPPPPPPPSTTLATVTRTSTASTGPTSSPPSGGNGGSVPQWGQCGGNGYTGPTQCQAPFKCVVESEWWSSCQ

SEQ ID NO: 21483 - protein, 470 aa, Trichoderma parceramosum
MIVGILTTLATLATLAASVPLEERQACSSVWGQCGGQNWSGPTCCAAGSTCVYSNDYYSQCPPGAASSSSSTRASSTTNRVSSTTSTSSATPPPGSTTTRVPPVGSGTATYSGNPFVGVTPWANAYYASEVSSLAIPSLTGAMATAAAAVAKVPSFMWLDTLDKTPLMEQTLADIRTANKNGGNYAGQFVVYDLPDRDCAALASNGEYSIADGGVAKYKNYIDTIRQIVVEYSDIRTILVIEPDSLANLVTNLGTPKCANAQSAYLECINYAITQLNLPNIAMYLDAGHAGWLGWPANQDPAAQLFANVYKNASSPSALRGLATNVANYNGWNITSPPSYTQGNAVYNEKLYIHAIGPLLANHGWSNAFFITDQGRSGKQPTGQQQWGDWCNVIGTGFGIRPSSNTGDSLLDSFVWVKPGGECDGTSDSSAPRFDSHCALPDALQPAPQAGAWFQAYFVQLLTNANPSFL

SEQ ID NO: 21484 - protein, 459 aa, Trichoderma viride
MAPSVTLPLTTAILAIARLVAAQQPGTSTPEVHPKLTTYKCTKSGGCVAQDTSVVLDWNYRWMHDANYNSCTVNGGVNTTLCPDEATCGKNCFIEGVDYAASGVTTSGSSLTMNQYMPSSSGGYSSVSPRLYLLDSDGEYVMLKLNGQELSFDVDLSALPCGENGSLYLSQMDENGGANQYNTAGANYGSGYCDAQCPVQTWRNGTLNTSHQGFCCNEMDILEGNSRANALTPHSCTATACDSAGCGFNPYGSGYKSYYGPGDTVDTSKTFTIITQFNTDNGSPSGNLVGITRKYQQNGVDIPSAQPGGDTISSCPSASAYGGLATMGKALSSGMVLVFSIWNDNSQYMNWLDSGNAGPCSSTEGNPSNILANNPNTHVVFSNIRWGDIGSTTNSTAPPPPPASSTTFSTTRRSSTTSSSPSCTQTHWGQCGGIGYSGCKTCTSGTTCQYSNDYYSQCL

SEQ ID NO: 21485 - protein, 397 aa, Trichoderma harzianum
MPSLSFTAALGLLSLLPAAQAGWNQNSNDNIVVYWGQNSGSVGQNRLSYYCQNAPDVDVINISFMVGITNLNLNLANVGNNCTSFPQAPNLLNCPQVAADIVECQQTYGKTIMMSLFGSTYTESGFSSSSAAVSAAQEMWAMYGPVQSGNSTPRPFGNAVVDGFDFDLEDPIENNMEPFAAELKSLMDAATSKKFWLSAAPQCPYPDVSDESFLDGQVAFDWVNVQFYNNGCGVSHYPADFNWATWDNWAKTVSANKNAKVLIGTPANVGGANAGSFPTDSQLSGAISLAKGTSSFGGVMLWDMAQLFSNTGYLAKIVADLGGSASTPPPPPPSTTLATVTRTSTAASGPTSSAPAGGNGGSVPQWGQCGGDGYTGPTQCQAPFKCVVESEWWSSCQ

SEQ ID NO: 21486 - protein, 89 aa, Trichoderma harzianum
MQFSIVALFATGALASVSVCPNGLYSNPQCCGANVLGVAALDCHTPRVDVLTGPIFQAVCAAEGGKQPLCCVVPVAGQDLLCEEAQGTF

SEQ ID NO: 21487 - protein, 71 aa, Trichoderma harzianum
AVCPTGLFSNPLCCSTNVLDLVGVDCVTPTAAVPDGVFFQAHCASKGKQPLCCVAPVAKQGVLCQKPIGTQ

SEQ ID NO: 21488 - protein, 380 aa, Trichoderma harzianum
MTKLSLLLGALAASVCVQSHALPSPPTVTQAPELEDRATTCTFSGANGASSASKSQKSCATIVLSNVAVPSGVTLDLSDLNDGTTVIFQGTTTWGYKEWSGPLLQIEGNDITIQGASGSVLDPQGSRWWDGEGSNGGKTKPKFFAAHDLTPSSITNLNIRNTPVQAVSVNGVNGLTITGMTIDNSAGDSGGGHNTDGFDIGSSSNVVISGAKVYNQDDCVAVNSGTNITFTGGLCSGGHGLSIGSVGGRDDNTVQTVTFSNSQVTKSANGIRIKASAGDTGTIKGVTYTGTTLSGITGYGILIEQNYDGGDLHGSPTSGIPITNLVLQNISGSGGVLSSANNIAVVCGSGACSSWTWSNVVVTGGKKYGSCQNVPSVATC

SEQ ID NO: 21489 - protein, 248 aa, Trichoderma harzianum
MRSLSLFTALLAGQAFAYPKPVLQSSTRRDWPTINEFLTELAEIMPIGDTVSAACDLIGDAEDVAADLFDISNTENDACGDVTVLFARGTCDPGNVGVLVGPWFFNSLETALPNKKVGVKGVPYPASVQGFLSGSVQPGIDMANQIKSVISSCPNTKLVLGGYSQGSMVVHNAASNLDAATMAKVSAVVLFGDPYDGRPVANYDASKVLVVCHDGDNICQGGDFILLPHLTYAEDADTAAAFVKPLVS

SEQ ID NO: 21490 - protein, 505 aa, Trichoderma harzianum
MYRKLAAISAFLAAARAQQVCTQQAETHPPLTWQKCTASGCTAQSGSVVLDANWRWTHDTKSTTNCYDGNTWSSTLCPDDATCAKNCCLDGANYSGTYGVTTSGDALTLQFVTASNVGSRLYLMANDSTYQEFTLSGNEFSFDVDVSQLPCGLNGALYFVSMDADGGQSKYPGNAAGAKYGTGYCDSQCPRDLKFINGQANVEGWEPSSNNANTGVGGHGSCCSEMDIWEANSISEALTPHPCETVGQTMCSGDACGGTYSNDRYGGTCDPDGCDWNPYRLGNTSFYGPGSSFALDTTKKLTVVTQFATDGSISRYYVQNGVKFQQPSASVGSYTGNTINTAYCAAEQTAFGGTSFTDKGGLAQINKAFQGGMVLVMSLWDDYAVNMLWLDSTYPTNATASTPGAKRGSCSTSSGVPAQVEAQSPNSKVIYSNIRFGPIGSTGGNTGSNPPGTSTTRAPPSSTGSSPTATQTHYGQCGGTGWTGPTRCASGFTCQVLNPFYSQCL

SEQ ID NO: 21491 - protein, 419 aa, Trichoderma sp.
MNKPMSSLLLAATLLAGGSIAQQTVWGQCGGQGWSGPTSCVAGSACSTLNPYYAQCIPGATTMSTTTKPTSVSASTTRASATSSATPPPSSGLTRFAGVNIAGFDFGCGTDGTCVTSKVYPPLKNYAGTNNYPDGVGQMQHFVNDDKLTIFRLPVGWQYLVNNNLGGTLDSNNFGKYDQLVQACLSLGVYCIVDIHNYARWNGGIIGQGGPTNDQFTSLWSQLAQKYASQSKVWFGIMNEPHDVNINTWATTVQAVVTAIRNAGATSQFISLPGNDWQSAGAFISDGSAAALSQVKNPDGSTPNLIFDLHKYLDSDNSGTHADCVTNNVNDAFSPVATWLRQNNRQAILTETGGGNTQSCIQYLCQQFQYINQNSDVYLGYVGWGAGSFDSTYILTETPTGSGSSWTDTSLVSSCISRK

SEQ ID NO: 21492 - protein, 418 aa, Trichoderma viride
MNRTMAPLLLAASTLVGGVAAQQTVWGQCGGIGWSGPTNCAPGSACSTLNSYYAQCIPGATSITTSTRPPSGPTTTTRATSTTSSTPPTSSGDRFVGVNVAGFDFGCSTDGTCVTSKVYPPLKNFTGSNNYPDGIGQMQHFVNDDGMTIFRLPVGWQYLVNNNLGGALDPTSISKYDQLVQGCLSLGVYCIVDIHNYARWNGGIIGQGGPTNAQFTSLWSQLASKYASQSRVWFGIMNEPHDVNINTWAATVQEVVTAIRNAGATSQYISLPGNDWQSAAAFISDGSAAALSQVTNPDGSTTNLIFDVHKYLDSDNSGTHAECTTNNIDGAFAPLATWLRQNNRQAILTETGGGNVQSCIQYLCQQVQYLNQNSDVYLGYVGWGAGSFDNTYVLTETPTGSGNSWTDTSLVSSCLARK

SEQ ID NO: 21493 - protein, 418 aa, Trichoderma viride
MNKSVAPLLLAASILYGGAAAQQTVWGQCGGIGWSGPTNCAPGSACSTLNPYYAQCIPGATTITTSTRPPSGPTTTTRATSTSSSTPPTSSGVRFAGVNIAGFDFGCTTDGTCVTSKVYPPLKNFTGSNNYPDGIGQMQHFVNDDGMTIFRLPVGWQYLVNNNLGGNLDSTSISKYDQLVQGCLSLGAYCIVDIHNYARWNGGIIGQGGPTNAQFTSLWSQLASKYASQSRVWFGIMNEPHDVNINTWAATVQEVVTAIRNAGATSQFISLPGNDWQSAGAFISDGSAAALSQVTNPDGSTTNLIFDVHKYLDSDNSGTHAECTTNNIDGAFSPLATWLRQNNRQAILTETGGGNVQSCIQDMCQQIQYLNQNSDVYLGYVGWGAGSFDSTYVLTETPTGSGNSWTDTSLVSSCLARK

SEQ ID NO: 21494 - protein, 418 aa, Trichoderma viride
MNRTMAPLLLAASILFGGAAAQQTVWGQCGGIGWSGPTSCAPGSACSTLNPYYAQCIPGATSITTSTRPPSGPTTTTRATSTTSSPPPTSSGVRFAGVNIAGFDFGCTTDGTCVTSKVYPPLKNFTGANNYPDGIGQMQHFVNDDGMTIFRLPVGWQYLVNNNLGGTLDSTSISKYDQLVQGCLSLGVYCIIDIHNYARWNGGIIGQGGPTNAQFTSLWSQLASKYASQSRVWFGIMNEPHDVNINTWAATVQEVVTAIRNAGATSQYISLPGNDYQSAAAFISDGSAAALSQVTNPDGSTTNLIFDVHKYLDSDNSGTHAECTTNNIDGAFAPLATWLRQNNRQAILTETGGGNVQSCIQDLCQQIQYLNQNSDVYLGYAGWGAGSFDSTYILTETPTGSGNSWTDTSLVSSCLARK

SEQ ID NO: 21495 - protein, 247 aa, Trichoderma viride
MKATLVLGSLIVGAVSAYKATTTRYYDGQEGACGCGSSSGAFPWQLGIGNGVYTAAGSQALFDTAGASWCGAGCGKCYQLTSTGQAPCSSCGTGGAAGQSIIVMVTNLCPNNGNAQWCPVVGGTNQYGYSYHFDIMAQNEIFGDNVVVDFEPIACPGQAASDWGTCLCVGQQETDPTPVLGNDTGSTPPGSSPPATSSSPPSGGGQQTLYGQCGGAGWTGPTTCQAPGTCKVQNQWYSQCLPWEGPR

SEQ ID NO: 21496 - protein, 470 aa, Trichoderma viride
MIVGILTTLATLATLAASVPLEERQACSSVWGQCGGQNWSGPTCCASGSTCVYSNDYYSQCLPGAASSSSSTRASSTTARASSTTSRSSATPPPGSSTTRVPPVGSGTATYSGNPFVGVTPWANAYYASEVSSLAIPSLTGAMATAAAAVAKVPSFMWLDTFDKTPLMEQTLADIRTANKNGGNYAGQFVVYDLPDRDCAALASNGEYSIADGGVDKYKNYIDTIRQIVVEYSDIRTLLVIEPDSLANLVTNLGTPKCANAQFAYLECINYAVTQLNLPNVAMYLDAGHAGWLGWPANQDPAAQLFANVYKNASSPRALRGLATNVANYNGWNITSPPSYTQGNAVYNEQLYIHAIGPLLANHGWSNAFFITDQGRSGKQPTGQQQWGDWCNVIGTGFGIRPSANTGDSLLDSFVWIKPGGECDGTSDSSAPRFDSHCALPDALQPAPQAGAWFQAYFVQFLTNANPSFL

SEQ ID NO: 21497 - protein, 471 aa, Trichoderma viride; identical to SEQ ID NO: 21476

SEQ ID NO: 21498 - protein, 397 aa, Trichoderma viride
QQTVWGQCGGIGWSGPTNCAPGSACSTLNSYYAQCIPGATSMTTSTRPPSGPTTTTRATSTTSSTPPTSSGDRFVGVNVAGFDFGCSTDGTCVTSKVYPPLKNFTGSNNYPDGIGQMQHFVNDDGMTIFRLPVGWQYLVNNNLGGPLDPTSISKYDQLVQGCLSLGVYCIVDIHNYARWNGGIIGQGGPTNAQFTSLWSQLASKYASQSRVWFGIMNEPHDVNINTWAATVQEVVTAIRNAGATSQYISLPGNDWQSAAAFISDGSAAALSQVTNPDGSTTNLIFDLHKYLDSDNSGTHAECTTNNIDGAFAPLATWLRQNNRQAILTETGGGNVQSCIQYLCQQVQYLNQNSDVYLGYVGWGAGSFDNTYVLTETPTGSGNSWTDTSLVSSSLARK

SEQ ID NO: 21499 - protein, 459 aa, Trichoderma viride
MAPSVTLPLTTAILAIARLVAAQQPGTSTPEVHPKLTTYKCTKSGGCVAQDTSVVLDWNYRWMHDANYNSCTVNGGVNTTLCPDEATCGKNCFIEGVDYAASGVTTSGSSLTMNQYMPSSSGGYISVSPRLYLLDSDGEYVMLKLNGQELSFDVDLSALPCGENGSLYLSQMDENGGANQYNTAGANYGSGYCDAQCPVQTWRNGTLNTSHQGFCCNEIDILEGNSRANALTPHSCTGTACDSAGCSFNPYGSGYKSYYGPGDTVDTSKTFTIITQFNTDNGSPSRNFVGITRKYQQNGVDIPSAQPGGDTISSCPSASAYGGLATMGKALSSGMVLVFSIRNDNSQYMNWLDSGNAGRCSSTEGNPSNILPNNPNTHFVFSNICWGDIGSTTNSTAPPPPPASSTTFSTTRRSSTTSSSPSCTQTHWGQCGAIGCSGCKTCTSGTTCQYSNDYYSQCL

SEQ ID NO: 21500 - protein, 89 aa, Trichoderma viride
MQFSIVALFATGALASVSVCPNGLYSNPRCCGANVLGVAALDCHTPRVDVLTGPIFQAVCAAEGGKQPLCCVVPVAGQDLLCEEAQGTF

SEQ ID NO: 21501 - protein, 471 aa, Trichoderma viride
MIVGILTTLATLATLAASVPLEERQACSSVWGQCGGQNWSGPTCCASGSTCVYSNDYYSQCLPGAASSSSSTRAASTTSRVSPTTSRSSSATPPPGSTTTRVPPVGSGTATYSGNPFVGVTPWANAYYASEVSSLAIPSLTGAMATAAAAVAKVPSFMWLDTLDKTPLMEQTLADIRTANKNGGNYAGQFVVYDLPDRDCAALASNGEYSIADGGVAKYKNYIDTIRQIVVEYSDIRTLLVIEPDSLANLVTNLGTPKCANAPSAYLECINYAVTQLNLPNVAMYLDAGHAGWLGWPANQDPAAQLFANVYKNASSPRALRGLATNVANYNGWNITSPPSYTQGNAVYNEKLYIHAIGPLLANHGWSNAFFITDQGRSGKQPTGQQQWGDWCNVIGTGFGIRPSANTGDSLLDSFVWVKPGGECDGTSDSSAPRFDSHCALPDALQPAPQAGAWFQAYFVQLLTNANPSFL

SEQ ID NO: 21502 - protein, 514 aa, Trichoderma viride
MYQKLAVISAFLATARAQSACTLQTETHPSLTWQKCSSGGTCTQQTGSVVIDANWRWTHATNSSTNCYDGNTWSSTLCPDNETCAKNCCLDGAAYASTYGVTTSADSLSIGFVTQSAQKNVGARLYLMASDTTYQEFTLLGNEFSFDVDVSQLPCGLNGALYFVSMDADGGVSKYPTNTAGAKYGTGYCDSQCPRDLKFINGQANVEGWEPSSNNANTGIGGHGSCCSEMDIWEANSISEALTPHPCTTVGQEICEGDGCGGTYSNDRYGGTCDPDGCDWNPYRLGNTSFYGPGSSFTLDTTKKLTVVTQFETSGAINRYYVQNGVTYKQPNAELGSYSGNELNDDYCTAEESEFGGSSFSDKGGLTQFKKATSGGMVLVMSLWDDYYANMLWLDSTYPTNETSSTPGAVRGSCSTSSGVPAQLESQSPNAKVVYSNIKFGPIGSTGNPSGGNPPGGNPPGTTTTRRPATTTGSSPGPTQTHYGQCGGIGYSGPTVCASGTTCQVLNEYYSQCL

SEQ ID NO: 21503 - protein, 344 aa, Trichoderma viride; identical to SEQ ID NO: 21469

SEQ ID NO: 21504 - protein, 514 aa, Trichoderma viride
MYRKLAVISAFLATARAQSACTLQSETHPPLTWQKCSSGGTCTQQTGSVVIDANWRWTHATNSSTNCYDGNTWSSTLCPDNETCAKNCCLDGAAYASTYGVTTSGNSLSIGFVTQSAQKNVGARLYLMASDTTYQEFTLLGNEFSFDVDVSQLPCGLNGALYFVSMDADGGVSKYPTNTAGAKYGTGYCDSQCPRDLKFINGQANVEGWEPSSNNANTGIGGHGSCCSEMDIWEANSISEALTPHPCTTVGQEICEGDGCGGTYSDNRYGGTCDPDGCDWDPYRLGNTSFYGPGSSFTLDTTKKLTVVTQFETSGAINRYYVQNGVTFQQPNAELGSYSGNGLNDDYCTAEEAEFGGSSFSDKGGLTQFKKATSGGMVLVMSLWDDYYANMLWLDSTYPTNETSSTPGAVRGSCSTSSGVPAQVESQSPNAKVTFSNIKFGPIGSTGDPSGGNPPGGNPPGTTTTRRPATTTGSSPGPTQSHYGQCGGIGYSGPTVCASGTTCQVLNPYYSQCL

SEQ ID NO: 21505 - protein, 344 aa, Trichoderma viride
MIQKLSNLLVTALAVATGVVGHGHINDIVINGVWYQAYDPTTFPYESNPPIVVGWTAADLDNGFVSPDAYQNPDIICHKNATNAKGHASVKARDTILFQWVPVPWPHPGPIVDYLANCNGDCETVDKTTLEFFKIDGVGLLSGGDPGTWASDVLISNNNTWVVKIPDNLAPGNYVLRHEIIALHSAGQANGAQNYPQCFNIAVSGSGSLQPSGVLGTDLYHATDPGVPINIYTSPLNYIIPGPTVVSGLPTSVAQGSSAATATASATAPGGGSGPTSRTTTTARTTQASSRPSSTPPATTSAPAGGPTQTLYGQCGGSGYSGPTRCAPPATCSTLNPYYAQCLN

SEQ ID NO: 21506 - protein, 515 aa, Trichoderma viride
MYRKLAVISAFLATARAQSACTLQTETHPSLTWQKCSSGGTCTQQTGSVVIDANWRWTHATNSSTNCYDGNTWSSTLCPDNETCAKNCCLDGAAYASTYGVTTSADSLSIGFVTQSAQKNVGARLYLMASDTTYQEFTLLGNEFSFDVDVSQLPCGLNGALYFVSMDADGGVSKYPTNTAGAKYGTGYCDSQCPRDLKFINGQANVEGWEPSSNNANTGIGGHGSCCSEMDIWEANSISEALTPHPCTTVGQEICEGDGCGGTYSNDRYGGTCDPDGCDWNPYRLGNTSFYGPGSSFTLDTTKKLTVVTQFETSGAINRYYVQNGVTYKQPNAELGSYSGNELNDDYCTAEESEFGGSSFSDKGGLTQFKKATSGGMVLVMSLWDDYYANMLWLDSTYPTNETSSTPGAVRGSCSTSSGVPAQLESQSPNAKVVYSNIKFGPIGSTGNPSGGNPPGGNPPGTTTTRRPATTTGSSPGPTQTHYGQCGGIGYSGPTVCASGTTCQVLNEYYSQCPV

SEQ ID NO: 21507 - protein, 423 aa, Hypocrea virens
MTNNKARRLLAASLYLGATGVIAQQQTTWGQCGGIGYSGPTSCTSGTSCSTLNSYYAQCIPATGIITSTRTTLASTTATTTASTKTSATSLPPPTSGVRFAGINIAGFDFSCSTDGTCNVSGAYPPLKNYDGANNYPDGVGQMQHFVKDDNFNIFRLPVSWQYLVNANLGGTLDATNLGYYDQLVQGCLATGAYCIIDIHNYARWNGKIIGQGGPTNAQFVSLWSQLATKYASEPRIWFGTMNEPHDLNITTWAGTVQAVVTAIRNAGATSQYISLPGTDYQSAGQIISDGGAAALSAITNPDGSKTNLIFDVHKYLDSDNSGTNSICVTDNVDSAFAPLATWLRTNKRQAILTETGGGNTASCEQYMCQQIQYINQNSDVYMGYVGWAAGSFDPGYPLAETPVQASSGAWTDQPLVKLCLAR

SEQ ID NO: 21508 - protein, 397 aa, Hypocrea virens; identical to SEQ ID NO: 21482

SEQ ID NO: 21509 - protein, 411 aa, Hypocrea virens
MFFSKVTLGAGLLASLASAAPSPIARRQAPGAQNVVYWGQNGGSTVENNDLSAYCTPTSDIDIIVLSFLYQWGQGASALGGTIGQSCGITTSGQPQNCDALTAAITKCKNAGVKIILSLGGASAYSSFSSADQASQAGQYLWNAYGGGSGVTRPLGNNIMDGWDLDIESNPGTNQYYASLVNTLRSNFASDPAHKYVITGAPQCPLPEPNMGVIIQNSVFDYLWVQFYNNNDYPADPCSLGLPGDAPFNYNNWTTFLQTTPSKNAKLFIGVPAAPLAANGGPGGAVYYATPSQLATIVNDVKGESNFGGIMMWSAGFSDSNVNDGCNYAQEAKHILLTGSPCSSGPVSVSQPSVPTSTTTSKPPGSSQTPPPSSGSVPQWGQCGGNGYTGPTQCIAPFKCVATSEWWSQCE

SEQ ID NO: 21510 - protein, 376 aa, Hypocrea virens
MKFQTVVYWGQYTGEKSLADYCNSISGIDIIVLAFLNNLLPGNTLSGSLGPLCSIGASGSIQGCNNIASDIKTCQAANVKIIISLGGWYSSISLQSASQAEDVGQSLWDMYGNEPNSTAPRPFGEAFVNGFDFDIEHQDDNYNQYYQNMIKQLRSNFAKDSSNKYYITGAPQCFLPETNMGTIIQNSEFDYLWIQFYNNNCALAIDNGKNFNYKDWTDILFTTQSRNASLFIGLPASVNASTGSDSGSQYYIAPEQLATHINSQKSEQNFGGVMLWDAGYSDGNINNGCTYAQNIHHILVTGSACGHSESLMSSPLSSRTTASAQAAYTPPLETTSSILDKVPIWGQCGGQDYTGPTLCLPPYQCIQLSKWWSSCH

SEQ ID NO: 21511 - protein, 380 aa, Hypocrea virens
MAKLSLLLGAFAASVCVQSHALPPPPTVTKAPKLEDRATTCTFSGASGAASASKSQKSCATIVLSNVAVPSGVTLDLSDLNDGTTVIFQGTTTWGYKEWSGPLLQIEGNDITIQGASGSVLNPDGARWWDGEGSNGGKTKPKFFAAHDLTSSSITNLNIKNTPVQAVSVNGVNGLTITGMTIDNSAGDSAGGHNTDGFDIGSSSNVVISGAKVYNQDDCVAVNSGTNITFTGGLCSGGHGLSIGSVGGRDDNTVQTVTFSNSQVTKSANGIRIKATAGDTGTIKGVTYSGITLSSITGYGILIEQNYNGGDLHGSPTSGIPITNLVVQNISGSGGVLSSANNIAIVCGSGACSSWTWSNVVVTGGKKYGSCQNVPNVASC

SEQ ID NO: 21512 - protein, 184 aa, Hypocrea virens
MFTAQNEYASATGIEQVVTDNIKAAFNGTDTFVDTKRNEVTLNIDFDCPVICPANRATTVTCSGYTQLMSITYTAKMKLVPEVTFTGGFTRAGSKKGETSHFLKGESKKRVYTDIPNGPANELKDKAASNADPWDWTEALDKNPHIQTLVDRISDPQCYEMYVRGKWEGISGWKFVIQTDIKTA

SEQ ID NO: 21513 - protein, 164 aa, Hypocrea virens
MVNEHNIHRSNHSAPDLSWDTTLAGYAQTIAEGCVFAHDMTQGGGGYGQNLASFGSTGNIDDLQIESGRRGVTDQWYNDEMENWTYYGQSNPPSGSNLDAWGHFTQVVWKSSTKVGCYTAKCPAGTVLSFPSWYTVCNYSPPGNFGGEYAENVLPPLGHPTVTV

SEQ ID NO: 21514 - protein, 93 aa, Hypocrea virens
MQFFAVAALFVASALAAPAGDEGCPGGILHNVPLCCATNVLGVATLDCGTPTVPVLTPAQFQSHCAGKGKQPVCCSIPAAGLGLLCEKPVGTQ

SEQ ID NO: 21515 - protein, 94 aa, Hypocrea virens
MNFFTAAALFAAVVVAHPLEHRSSNVCPDGLFSNPLCCATAILGLVGLDCQSPPRLYDNAAEFQTSCAKLGHAPFCCVAPVANQGILCQKPVGN

SEQ ID NO: 21516 - protein, 102 aa, Hypocrea virens
MQFLAVAALLFTAAFAAPSSEAHGLRRRDQAWCPDGLYASPQCCDVDVLGVAALDCRTPPVAPSKCKSFGSVCAAIGLQPKCCVLPVAGVAVLCTDPLPPAF

SEQ ID NO: 21517 - protein, 505 aa, Hypocrea virens
MYQKLAAISAFLAAARAQQVCTQQAETHPPLTWQKCSSSGCTAQSGSVVLDANWRWTHDVKSTTNCYDGNTWSKTLCPDDATCAKNCCLDGAAYSSTYGITTSSDSLTINFVTQSNVGARLYLMATDTSYQEFTLSGNEFSFDVDVSQLPCGLNGALYFVSMDADGGQSKYPTNAAGAKYGTGYCDSQCPRDLKFINGQANVDGWQPSSNNANTGIGGHGSCCSEMDIWEANSISQAVTPHPCETVGQTMCSGDGCGGTYSSDRYGGTCDPDGCDWNPYRLGNTTFYGPGSGFTLDTTKKMTVVTQFATSGAISRYYVQNGVKFQQPNAQLSGYSGNTLNSDYCAAEQAAFGGTSFTDKGGLAQFNKALSGGMVLVMSLWDDYYANMLWLDSTYPTNATASTPGAKRGSCSTSSGVPSQIESQSPNAKVVFSNIRFGPIGSTGGSTGNPPPGTSTTRLPPSSTGSSPGPTQTHYGQCGGIGYSGPTQCVSGTTCQVLNPYYSQCL

SEQ ID NO: 21518 - protein, 182 aa, Hypocrea virens
MKLLAITALFIAGTLAVPASSYPPPPPEYGDGHKGDVGYGGDHGGDHGKDHGKDHGGHYPGDPNYPPPPPPGYHNGGSDKPPTDGDGYPSDGGDDGDDSDGGGHGGDRENDPSDLCPTLLYSNPQCCSASVLNIADLDCEPPRKRPSRKHDFKQICAAQGSDAKCCVLPLLGLGILCTDAIV

SEQ ID NO: 21519 - protein, 840 aa, Hypocrea virens
MKCARVLALFLGAAIPAQAAFTWKNVKIGGGGGFVPGIVFHPKTKGVAYARTDIGGLYRLNSDDSWTPVTDGIANDAGWHNWGIDAVALDPQNDQKVYAAVGMYTNSWDPNNGAIIRSSDRGATWSFSNLTFKVGGNMPGRGAGERLAVDPANSNIIYFGARSGNGLWKSTDGGVTFSKVTSFTATGTYAADPTDPNGYNNDKQGLMWITFDSTSSTSGGATSRIFVGTADNITASVYVSTNAGSTWTAVPGQPGKYFPHKAKLQPTEKALYLTYADGTGPYDGTLGSVWRYDITAGTWKDITPVSGSDLYFGFGGLGVDIQKPGTLVVASLNSWWPDAQLFRSTDSGTTWSPIWQWASYPSMTYYYGISTPKAPWIKNDFIDVTSESPSDGLIKRLGWMIESLEIDPLDSNHWLYGTGMTIFGGHDLANWDTVHNVTIQSLADGIEEFAVQGLASAPGGSELLVALGDENGYTFTSPNSLSTSPQNVWSTPTWATSTSVDFAGNSVKNVVRVGNTAGTQQVAISSDGGVTWSINYGADTSMNGGTVAYSANADTILWSTASSGVRRSQYQGSFTAVSSLPAGAVIASDKKTNTIFYAGYASTFYVSKDTGSTFTTGPKLGSSTSIRDIIAHPTTAGTLYVSTDAGIFRSTDSGTTFTIVSTALTNVYQIALGVGSGSNWNLYALGTGSAGARLYASGDNGATWTDIQGSTQGFGAIDGVRLAGSASTAGQVYVGTNGRGVFYAQGTISGGNGGSPSSSISSSKPSTTTSSRTTLSSSTISTTRTSIVTSTTRTSSSASPSGTGLAQHFAQCGGIGWTGPTQCVSPWKCQEQNEYYYQCV

SEQ ID NO: 21520 - protein, 846 aa, Hypocrea virens
MVIQSLLIFFLAAIAPVSAESGIDAWLRYARLPGSVTRGHLNSFPNRIVVLNASKNGPLASASSELHKGIQGILGLDLDVSSSGKSCSAQNTIVVSTLETYQSSCGKLSPKLNLKEDGYWLSAKGKSVQIIGQNERGALYGAFQYLSLLAQGDFSEVAYASNPSAPVRWANQWDNLNAATAAHGSIERGYGGASIFFNNGLIKDDLSRVPLYGRLLASVGINGIIINNVNADANLLNETNLAGVKRIADLFRPWGVKVGISLNFASPQVLGALTTFDPLDSTVIKWWTDKTNRIYQLVPDFAGYLVKANSEGQPGPLTYNRTLAEGANLFAKAIEPHGGIVVFRAFVYDQLNETNWRADRANAAVQFFKDLDGQFDSNVLVQIKFGPIDFQVREPASPLFANLPKTAVSIELQVTQEYLGQQCHLVYLPPLWQTILGFDMRYNHRQSYVRDIVSGEVFNHKLGGYAGVINVGMDDTWIGSHLAMSNMFAFGRLAWNPQADSQDIIEEWTRLTFGLSRDVISAIVDMSMKSWPAYEGYSGNLGIQTLTDILYTHYGANPASQDNNGWGQWTRADSKTIGMDRTVSNGTGNAGQYPKDVADKFEHTQTTPDDLMLWFHHVPYTFKLHSGKTVIQHFYDAHYSGAATVQKFPATWKSLKGQVDAERYVDVLYRLQYQAGHSLVWRDGISEFYRNLSSIPDKLNRVRNHPHRIEAEEMELSGFTTVNVSPTECASKYKAIATNGTGTATTKLNVPSGKYTVAINYYDVMGGSASYDVLLNGKSIGTWKGDSENYLGHDFSTFLDCHSAIRITFEDVKISRGDKLTIKGTGDAQEQAAIDYVAVLPQGVVD

SEQ ID NO: 21521 - protein, 452 aa, Hypocrea virens
MQLYRSITFVFTPAILTLAGLASSSDAFDGQSRRGSHVDRPNIKPHPLHPGKQFPHSPPRDASKYCFVKPSCSHIDDSPNILEAFQRCNHGGTVVFDATYIIASPLDLTFLDRVDVAILGTIGFNNNISYWTEHSFKYEYQNSSAMWRFGGKDVNIYGLGDGLIDGNGQAWYDAFAANPSLQRPILFVLDGLHGGSVSGLQMKNPPMWFNFIANSSEIVVSDIKLNVESTNGNPAKNTDGWDTYRSDSIVLQDSIINNGDDCVSFKPNSTNIVVQGLQCNGSHGISVGSLGQYINEFDIVENVYVYNISMSNASDGARIKVWPGSYTPFQPSLSGGGGSGYVMNVTYDGLYNSNNDWAIELTQCYGSTNLTLCNEYPSNMTISNVIFKNMWGTTSKKYDPKVGTLVCSTPSTCSNIRAQNITVQPPSGKPAQWICNNVNNTLLDINCVAQES

SEQ ID NO: 21522 - protein, 341 aa, Hypocrea virens
MHLAPRASCTFTDAATAIKGKTSCSTITLNGITVPAGETLDLTGLKDNTQVIFTGKTTFGYKEWAGPLISISGNGIQIQGASGHTIDCAGQRWWDGKGSNGGKTKPKFFSAHSLQNSNIKSLNVLNTPVQAFSINSVTNLGLYNVTLDNSLGDTKGGHNTDAFDVGSSTGVYISGAIVKNQDDCLAINSGTNITFTGGNCSGGHGLSIGSVGGRSDNTVKTVRILNSKVSNSQNGVRIKTVSGATGSVSDIIYDNISLSNIATYGIVIEQDYKNGGPTGTPTAGVPITGLTVNKVTGTVQSGGTNTYILCAACSKWTWTNNAVKGGTKTKKNKGVLSNVSI

SEQ ID NO: 21523 - protein, 419 aa, Hypocrea virens
MKLFRPVLWALVTALVADTYSLSPPQQTCVIPALKDDRDDAPAIRQAFSKCGNNGKVAFKKNTKYSIQTVLQLHNLKNVQVDMFGTLEYSTDVRYWILHGSYYYFQNISIAMEFSGEDITIDGYGSGTIDGQGQVWHDLALGVGGLYGRPIPFCLRNVKNAVAKNFEILQSGKWNFLMVEFQNILVDNITLSSTSDDFQANPGNLGNTDGFDTINSNNITIQNIWADVGDDCVSFKPGSTNIHVKNLTCYNSAGIAIGSLGQYEGVRDVVENITAEDVSLYGSRNGAYIKTYAGKRFYWPPQGGGNGYVRNVVFKNFHIENITASPVLIQQCTHWAGYNVPACADTPPTGFFSNISWYNFTGYMNEKVGTKAVSWTCSPLATCEGFSFKDINIKSATGANGTYSCTNVDGYDVTCEKTK

SEQ ID NO: 21524 - protein, 648 aa, Hypocrea virens
LPRRPSQQGFHKTFGQGRSIKRDLIQGDSQRPSGDTASNLKRTRNIDRRDERSPVGQRDRLEGSSPTALGANRQRPPDNARPHPSSQSSKSSTSHVSSVPLKPVLDLIAERMTWFRARNEASKSHKRAMANQEQSHYRPSDYASSPELLATQQRQTLEEMRKAEKNLGEFDDRIAAAMQQLLQHMSEAWSKSPDASNASEDREASEAKMNTIQNTIQKEMEESFKKEATESQQLMKDLIGSQMAKLKEALTQENEQKLHSLQKTLAQEAEDRATSLRKTLMQDNEKRVAEMKDSINREHKARIIALENALSEEAKNKARIAALENAFKSQLTSLDDKIAMIDAELRMTISDQRILSESWINKAQLAEQLQQLSLSQDKKLGKLEAQVNLLPDHSPRIEELAEQICDHSKLIKDKEQMQDEANLRLDSLESTLTNFLEEGEEIKERVQKLSSTKPVSVSNDQILEVIKPEMAKNTKDTREMIMQIQHKLRPFLEQERHKRETLEEQVGDVARQITEIQKESATTKTDYSGLTEKLDGQTDEVKRLEESTNIRIGLIMDEFRSQMESVYIQVQTLNSWQTNFSTQGLYRDMVNHINRTIPEGPAAVPQIKLLKQQVSGIETRIAAWESTSNKKRKLVSGNARVVNGHQTD

SEQ ID NO: 21525 - protein, 443 aa, Hypocrea virens
MMLTKSYLLAAATAASTLAAVLQPVPRASSFVTVSGTQFNIDGKVGYFAGTNCYWCSFLTNPADVDSTLSHIASSGLKVLRVWGFNDVNQQPSPGNIWFQKLSASGSTINTGTDGLQTLDYVVKSAEQHGIKLIIPFVNNWNDYGGINAYVNAFGGNATTWFTNSAAQTQYRKYIQAVVSRYSNSTAIFAWELANEPRCNQCDTGVIVQWATSVSQYVKSLDSNHLVTLGDEGLGLSTGDGSYPYTYGEGTDFAKNVAIKSLDFGTFHLYPDSWGTNYPWGTTWVQTHAAACLAANKPCVFEEYGAQNNPCTNEAPWQSTSLALAARGMGGDMFWQWGDTLSYGQSNSDPYTVWYNSSNWQCLVQNHVAAINGGTTPPPPSSTTTTKSATTTSTKTTSTASQPTGNCSPLYGQCGGLSWTGAKCCSQGTCRYSNDWYSQCVPS

SEQ ID NO: 21526 - protein, 397 aa, Hypocrea virens
MVRSLAYVGALLAALPSARAGFNASSTQNIAVYWGQNSANQANSQQRLSTYCANAEIDIIPIGFMNGISPVITNFANAGNNCTAFPDNANALDCPQIEEDIITCQKTYGKTILISLGGGSYSQGGFSSASAATSAAQTVWNMFGPVNPNSTVDRPFGSAVVDGVDFDFESGVNNLATFATELRSLMDASASSANRKFYLSAAPQCVYPDYADNPALNGVVSFDFIMIQYYNNGCGVSSYVPGATIQWNYNFDVWDNWAHTVSKNPNVKILLGIAANTGAASGYVSGTQLSAVISFTKQYSSFAGIMMWDMSQLYENSGFLDQVVSDLAAPGSSPPATTSTGGSKPTSTSGGSTGPTGGGGGTVPQWGQCGGEGYTGPTQCQSPYKCVVSSTWWASCQ

SEQ ID NO: 21527 - protein, 347 aa, Hypocrea virens
MTQKLTSLLVTALTVATGVIGHGHVNNIVINGAYYQGYDPTLFPYEPNPPIVVGWTASDTDNGFVAPDAYQSPDIICHRNATNARGHASVMAGSSVLIQWVPIPWPHPGPVLDYLANCNGDCETVDKTTLEFFKIDGIGLISGGNPGRWASDVLIGNNGTWVVQIPADLETGNYVLRHELIALHSAGSVDGAQNYPQCFNLAVTGTGSLQPTGVLGTKLYQESDPGILFNIYTSPLTYTIPGPTVVSGLPSSVTQRSSTATATSIATVPGSVSTGGTSSKTTTVPRSTSSATTRRSSSSAITTSAPAGPSQTLYGQCGGSGYSGPTICASPAVCSTLNPYYAQCLTR

SEQ ID NO: 21528 - protein, 248 aa, Hypocrea virens
MRSLAILATLLAGHAFAYPKPVLESPARRDWPTINEFLTELAEIMPIGDTVSAACDLIGDAEDVAADLFGISNTENDACGDVTVLFARGTCDPGNVGVLVGPFFFRSLQTALGSKTVGVKGVPYPASVQGFLSGSVQPGIDMANQIKSVLSSCPNTKLVLGGYSQGSMVVHNAATHLDAATMSKISAVVLFGDPYDGRPVANYDASKVLVVCHDGDNICQGGDFILLPHLTYAEDADTAAAFVKPLVS

SEQ ID NO: 21529 - protein, 830 aa, Hypocrea virens
MLPSETGIDGWLRYAALPDELASRHPQYSTIISLADDQCSPVFTAARELQLGLSKILSQNVTLETKLLVSAASSYIVIGTVKTFLSAGRDEYENLPLKDDGYCLVCKDGKATEIIGQNDRGALYGAFEFLRFLSRNQLLPEMRISNPSAPIRWVNQWDNLDGSIERGYAGPSIFFADGYVLDDLTRVQQYARLLASVGLNGLIVNNVNSNYNLLNPINMQGLTRIADIMRPWGVRIGVSLYFDTPKGLGGLRTSDPLDPDVIAWWGYITSELYRHVPDMLGYLIKANSEGQPGPLTYGRTLADGANMFARALQPHGDGVVMYRAFVYNHHLDESDWKNDRANAAVEYFDGLDTQFEDNVIVQIKYGPIDFQIREPPSPLLAHLRKTPIILELQVTQEYLGQQDHVVYLPPLWKTIFNFDLHVDGQQSLVRDIVSGQRFNWSRSGYAAVVNVGNDPTWLGSHLAMANLYAYGLCTWDPQQSEEDIIQGWAQLTFGLDKTIVDTITNISMASWPTYEDYSGNLGIQTLCDIVTHCHYGPCPASQDGNGWGQWTRADAHSIGMDRTVATGTGNAGQYPQVVAEQFECIDTTPDELLLWFHHVPYTHRLKSGKTVIQHFYDAHYAGALVAQTFPQQWEALRGLIDDDRFNHVAFRLRYQAGHALVWRDSINNFYYAKCEIKDERNRVGNHAWRIEAEDMTLEGYMVVPVTPFEAASGGKAIATIPGADIGTAQCTVTFPSGIYDIAINYYDHLGGRSQYQVFLNERLIGTWTGDLEDKLGHDFSDRIDGHSATRVTFNKVNVKKGDSLRIVGRPDGSELAPIDYVSLLPPGIVD

SEQ ID NO: 21530 - protein, 378 aa, Hypocrea virens
MRALVSEVNNWLSLAILILSLATAARASCALPTSFKWTSTGPLADPKSGWVSIKDFSSVPFNGKHLVYASTVNSAGSYGSMNFGLFSDWSSMDSASQNAMNNGAVAPNLFYFRPKNIWVMAQEWGQYPFNYMTSSDPTNPNGWSSPQALFTGSLSSPGAPIDPALISDGTDIYLFFAGDNGHIYRSSMPNSQFPASFGSNYTTIMTAATNDLFEAVQVYKVDGQNQYLMIVECIGSAGRYFRSFTASSLSGSWISQAASESNPFAGKANSGASWTNDISSGDLIRSTNDETMTIDPCNLQLLYQGMAIGSSGDYNSLPWRPGVLTLTNPGNSSDGSSGGGSGTAAHWAQCGGQGWTGPTTCESPYKCTVSSEWYSQCL

SEQ ID NO: 21531 - protein, 628 aa, Hypocrea virens
MPTAVRICVCGDESTGKSSLIASLVKDQFMTNKIQPVLPQITIPPSIGTPENVTTTIVDTSARPQDRTTLRKEIRKCNVILLVYADHYSYERVALFWMPYFRSLGVNVPVVLCANKSDLVGQSSTSQVVEEEMLPVMAEFREIDSCIRTSAREHRNVNEVFFLCQKAVTHPIAPLFDYKEGNLKPSCVEALKRIFYLCDKNQDGYLDNQEMRDFQSRCFDKPLTDDDLENIKLSISKSLRGDVDLSKGINLKGFVQLNKMYAEKGRHETIWIILRKYHHTDSLSLEENFLHPKFEVPEFCSAELSPAGYRFFVDLFLLFDKDNDGGLNDQELEALFAPTPGLPTSWADSFPSSTVRNEGGYITLQGWLAQWSMTTFLEPKTTLEYLAYLGFEPPNPKEPITSALKVTKPRKRRRRPGRVERNVFHCYILGASGAGKSSLLEAFLNRPFDDLYHPTIKPRRAVNSVELPGGKQVYLIFEELGELEPAILENQAKLDACDLLCYAYDSSDPDSFSHIVDIRKKHPQLDELPSVYTALKADRDKTMQRSELQPDQYTSSLNMSSPLHVSVTWNSISELFVSLAEAAANPSTAFPKSDDDTPDRTSLYLTLGATACAAIAAVMIWRRSTNAM

SEQ ID NO: 21532 - protein, 638 aa, Hypocrea virens
MKSAILLGLTGLAANVHAHPAKQHETGSTLTKRGIDISKYSLPSLSDYTPSTHVEEEVSIQAEGFKRDYVATATRAVKRAAPHAEFRVVNDHYIDVDGIGHVHFKQTVHGIDIDNADFKVNIGRNGRVFSHGNSFFSGKLPTESPLKKRAFSDPTDALKGAVDILGLPVQADGATAEAKEGTEKYTLKGTSGAVSDPEARLVYLVKDDGTLSLTWRVETDVVDNWLLTYIDATTNKEVHGVVDYVSDFATFEVFPWGLNDPTEGDRKTLTDPWSIAASPFTWLGDGTTNYTTTRGNNAIAQVNPTGGNDYLNNYRPTSATRAFEYPFSLTQTNPTDYRDASIAQLFYTANKYHDLLYALGFTEAAGNFQANNNGKGGLGNDFVILNAQDGSGTNNANFATPADGSNGRMRMYIWTVSTPRRDGSLEAGIVIHEYTHGLSTRLTGGPANSGCLGGVEAGGMGEGWSDLFATAIRLKPGDTRAKDYPMGAWADNNVKGIRQYPYSTSLTTNPLTYKSVNTQTEVHSSGTTWATILYEVLWNLIDKYGKNDADLPTFDSQGVPTDGKYLTLKLVLNGLALQPCTPTFVSARDAILDADRSLTGGENLCELWTAFAKRGLGSGARYSPTARVESFTIPAGVC

SEQ ID NO: 21533 - protein, 151 aa, Hypocrea virens
MRSSSFIAVAAAAAQGVAGLGINCHGDVYCGTVYLNGGTLSDFENIFNKLDDKRKYQNGEDVGCVQHLVGHLTGNFMATICAYIQNAKDDTTGATLKSVYKELQQYGCAVCGSVPLLYAKGDDDVNHGELTINIVDDLPENCKINEPCSAS

SEQ ID NO: 21534 - protein, 471 aa, Hypocrea virens
MVAGILVSLAALATLAASVPVEERQACSGVWGQCGGQNWAGPFCCVSGSTCVFSNDYYSQCLPGAASSSSSTRASSTTSRASSTSTRSSTTTPPPGSSTTSAPPVGSGTVTWQGNPFSGVTPWANAYYASEVSTLAIPSLTGAMATAAAAVAKVPSFMWLDTLDKTPLMSQTLSDIRAANKNGGNYAGQFVVYDLPDRDCAALASNGEYTIADGGVAKYKNYIDTIRGIVTTFSDIRILLVIEPDSLANLVTNLGTPKCANAQSAYLDCINYAITRLNLPNVAMYLDAGHAGWLGWPANQDPAAQLFANVYKNASSPQAVRGLATNVANYNAWNITSPPPYTQQNSVYNEKLYIHAIGPLLANHGWSNAFFITDQGRSGKQPTGQLEWGNWCNVIGTGFGIRPSANTGDSLLDAFVWVKPGGECDGTSNSSAPRFDSHCASPDALQPAPQAGSWFQAYFVQLLTNANPSFL

SEQ ID NO: 21535 - protein, 378 aa, Hypocrea virens
MRVTTTKIASPASTSVVFFAAMVAAQSCALPSSYRWSSSGPLANPKSPWVALKDFTNVVYNGKHLVYGSTHDSSNYGSMNFGLFSDWSQMGSASQNGMSQAAVAPTLFYFAPKSVWILAHQWGPTAFSYRTSSDPTNANGWSSPQPLFTGSISDSGDNGKIYRASMPIGNFPGNFGSSSTVIMSDSTSNLFEAVQVYTLKGLNKYLMIVECIGANGRYFRSFTATSLGGSWTAQAATESNPFAGKANSGATWTNDISHGDLARSNPDQTMTVDPCNLQLLYQGRDPNSNPSYDLLPYRPGLLTLQNPGTSTGGGGGSMSSSATLATSTVKPTTTSSAPPSGSGAAHWGQCGGIGWTGPTACQSPYTCTYSNPYYSQCL

SEQ ID NO: 21536 - protein, 401 aa, Hypocrea virens
MLSSSLLVSLGLATLAAAAPSRTVKARQASSGQNAVYWGGTNNENDNLSTYCTSSSGIDIVILSFLDIYGPTGNFPAGNIGNSCYVGTNGVPQQCDGLASSIATCQAAGIKVILSLGGAASSYSLASQSQAVAIGQYLWSAYGNSGNTTVQRPFGNVFVNGFDFDIELNAGSQYYQYMISTLRSSFASDPKNTYYITGAPQCPIPEPNMGEIISSSQFDYLWVQFYNNNPTCSLGLPGDAPFNFNDWVTFISTTPSKNAKLFIGAPASTLGANGNAGGAKYYATPDQLASIVDSTKSNPAFGGIMLWDAGYSDSNVNNGCTYAQEAKSILLTGSPCGGSGSPPPPPSSTSKAPPPATSTASSGGGTVPQWGQCGGEGYTGPTQCVAPYKCVAQGEWWSSCQ

SEQ ID NO: 21537 - protein, 347 aa, Hypocrea virens
MLSCGKLALILLAASLQEAVASLSSGCGKAVGTSSGTKSMTVNGKTRQYILQLPANYNASTGYKLIFGYHWLGGTMNNVAPGYYGLRDLARETAIFVAPQGLNNGWANSGGEDLIFTDQMLDYITSNACVDKDQIFSTGWSYGGAMTFELACSRPNVFKAVAVIAGAQLSGCDGGTTPIPYLGIHGVVDSVLPISRGRDLRDKFLQLNGCASKNAPEPAGGSGTHIKTTYDCRPGYPVWWIAHSGDHVPDPKDAGQSQSWAPGETWSFFTQPGLKGQSGGGGGSSSSVTTTSKVTFTTSSTTPTTTAGGGSCSARYGQCGGIGWSGPTCCQLGTTCKYSNDWYSQCL

SEQ ID NO: 21538 - protein, 100 aa, Hypocrea virens
MWSAGFSDLNVNNGCNYAQEAKNILLTGSPCSSGPVSVSQPAVPTSTTTSKPPGSSQTPPPSSGTVPQWGQCGGNGYTGPTQCVAPYKCVATSEWWSQCE

SEQ ID NO: 21539 - protein, 257 aa, Hypocrea virens
MHLNNIFSTLATTASAVNAMGINCQGSALCVGSNGELSSALDQLRGMDQNQQFTDGQHITCVGSPVSLGNPSLCLFYQKTGRSWTVAQTVRFVQALLDHGCEGCGSIPVDSGNNVQNGMLTANMVAAMGGPPPSRRGMDIVRAVSQKEKPADENAAIKKRGTTTTPSLAKRLGINCQGSSTCQVGGIFNTPAGTLDDLGNSIAGGPDGLWGDGQQIGCIAHVTGRLCAFYQNRVCGSVPTNDGNNVVNGQLTVNYVA

SEQ ID NO: 21540 - protein, 318 aa, Hypocrea virens
MVRRTALLALVALSSISMAQISDNFEGGWDQTTWPTYAPSCNQGGTVSLDTTVAHSGSNSMKVVGGPNGFCGHIFFGTTKVPSGDVYVRVWLQLKTALNNDHVTFIIMPDNAQGGDDLRIGGQSQVLDYNRESDDATLPDLSPQGIASSVNLPTGSFQCFEYYLGTDGTMQTWLNGNLISGMTAGPNADNANDAGWTRKSYVPDITGVYFGWEAYSGDINTVWFDDIAIETSRIGCGGPAASGSTTVHSTASGPTTSKPTTTTKPTTTIPPSTSKTTSSTSATQTKYGQCGGQGWTGPTACPPGSTCTYLNAYYSQCL

SEQ ID NO: 21541 - protein, 204 aa, Hypocrea virens
MKFNSAAIVAILAYTTLALPTPSPGKTDVGKVDLESRNGKMDVGKVDLERRNGKMDVGKVDLERRNGKMDVGKVDLERRNGKMDVGKVDLERRNGKMDVGKVDLERRNGKMDVGKVDLERRNGKMDVGKVDLERRNGKMDVGKVDLERRNGKMDVGKVDLERRNGKMDVGKVDLERRNGKMDVGKVDLERRNGKTDVSNVEDKY

SEQ ID NO: 21542 - protein, 419 aa, Hypocrea virens
MNKPISSLLLAATLLASGSIAQQTVWGQCGGIGYSGPTNCAAGSACSTLNPYYAQCIPGATTMSTSTKPTSVPASTTRASSTSSATPPAGSGLTRFAGVNIAGFDFGCGTDGTCVTSKVYPPLKNYAGTNNYPDGVGQMQHFVNDDKLTIFRLPVGWQYLVNNNLGGTLDANNLAKYDQLVQSCLSLGVYCIIDIHNYARWNGGIIGQGGPTNDQFTSLWSQLATKYASQSKVWFGIMNEPHDVNINTWATTVQAVVTAIRKAGATSQFISLPGNDWQSAGAFISDGSAAALSQVKNPDGSTTNLIFDLHKYLDSDNSGTHADCVTNNINDAFSPVATWLRQNNRQAILTETGGGNTQSCIQYLCQQFQYLNQNSDVYLGYVGWGAGSFDSTYILTETPTGSGSSWTDTSLVSSCIARK

SEQ ID NO: 21543 - protein, 457 aa, Hypocrea virens
MALSSTLPLAAAILVSCIAQIAAAQQPGTSTPEVHPKLTTYKCTTSGGCVAQDTSVVLDWNYRWMHDKNFNSCTVNGGVNSTLCPNEATCGANCFIEGVDYAASGVTVSGSSLTMNQYMPSSSGGYNSVSPRLYLLGSDGNYETLKLNGQELSFDVDLSTLPCGENGALYLSEMAANGGANQYNTAGANYGSGYCDAQCPVQTWKNGTLNTDHSGYCCNEMDILEANSKANAFTPHSCTATACDSSGCGFNPYANGFHNYWAPGGTLDTSKVFTIITQFNTDNGLPSGNLVSITRKYRQNGVDIPSAQSGGDTISSCSSASAYGGLTTMGQALARGMVLVFSIWNDNGGNMNWLDSGNNGPCSSTEGNPANIVANNPTTHVIFSNIRWGDIGSTTGSGGSTPPPPSTTLKTSTTSSRTTTSSAPGCTQTHWGQCGGKGYTGCTTCTAGTTCQYNNDC

SEQ ID NO: 21544 - protein, 324 aa, Hypocrea virens
MVAISITRIHDTSLPHFSTDSTNNENNDLSTYCEPNAGIDILVLSFLDIYGLTGNIPSGNIGNYGYIGTTVATCQEAGIKIILSIGGAGSSYSVQSLSQAVAIGKYHWEAYGYSGSTSVQRPFGIVFVNGFDFDVDLNAGNQFYQYLISTLRSNFASDPTNTYYTTGAPQYFSSEFDYLWIQFYNNNGVPANTLAANGNAGGAIYYATPSQFASTVQDTRSSPAFGGIMMWDAGYSDANVNNGCTYAQEAKNILLAGSPCGGSLPVSSSLSTTTAKPTKSATSTRSVSGTSPTGTVPQWGQCGGEGYIGPTQCIPPFKCVESSQ

SEQ ID NO: 21545 - protein, 459 aa, Hypocrea virens
MATRFFALLLLAIPIQAQSPVWGQCGGVGWSGPTTCVAGTTCVSYSEYYSQCIPNTQVSSTIPTTTLVTSFTSPPASSTSSSSATRATSTSAAACSALPGSISLKANPKLNDLFTMFNGDKVTTKDKFLCRQAEMSELIQRYELGTLPGRPATVTASFSGNTLTINCGDSGKSISFTVTISYPSSGTAPYPAIIGYGGGSLPAPAGVAMINFNNDNIAAQVNTGSRGQGKFYDLYGKGHSAGAMTAWAWGVSRVIDALELVPAARIDATRIGVTGCSRNGKGAMVAGAFDKRIVLTLPQESGAGGSACWRISDYLKSQGANIQTASEIIGEDPWFSTTFNSYVNQVPTLPFDHHSLAALIAPRGLFVIDNNIDWLGPQSCFGCMTAARTAWQALGVPNNIGYSQIGAHAHCAFPSNQQSQLTAFVQKFLLGQSTNTAIFQSDFTFSQPQWIDWTAPTLT

SEQ ID NO: 21546 - protein, 433 aa, Hypocrea virens
MAILSTFALFVALLSFLDPIDAHKTILERPKLHWGPKTPGHQFPHSPKRHKTCYVPNCLSSGHHGKNDDTPEILKAFKNCNKGGTVILNEEYTIASPLDLTFLEAVDVAITGTIKFTNDIDYWVKNSFKYDFQNSSAFWRFGGKDVNIYGRGQGLIDGNGQAWYDAFAAEPTLLRPILLVLDGLEHGSWFNLIANSTDILVSDIDIAVKSESKNPAKNGDGWDTFRSDSVVIQDSHVNNSDDCVSFKPNSTNIIVQGMQCNGSHGISVGSLGQYPAEYDIVENIYVYNVSMSNASDGARIKVWPGTNTPFEPGLSGGGGAGYVKNVTYDTFYNSNNDWAIEINQCYGQSNQTICDKYPSNITISDVIFKNMWGTTSTKYDPKVGTLTCSSTEKCLNISAYNISVIDPSGKTPQWICTNMDESLLDINCVSANS

SEQ ID NO: 21547 - protein, 200 aa, Hypocrea virens
MEYNLSTTRNELESGSSSACPRVIFIFARASTETGNMAGGASAGPAVANALESHYGASQVWVQGVGGPYTADLASNFLPGGTSQAAINEARRLFNEANQKCPSSVIVAGGYSQGTAVMSGSISGLSSTVQNQIKGVVLFGYTQNFQNGGRIPNFPSSKLDVFCAATDAVCYGTLFILPAHFLYTDEAADEAPDFLISRIG

SEQ ID NO: 21548 - protein, 120 aa, Hypocrea virens
MQFFAVLPLLYTTAAALGINCRGNANCVGTPECRLADLILQVSQQDPSTSYSPGQHIACCGIPGGNICAFTQGISNSITAGEALGMLQGLSAHGCGQCGSIPFKDNNVAEGQLTVNWTDH

SEQ ID NO: 21549 - protein, 378 aa, Hypocrea virens
AQGRHFCYVRPNTDGDDDAPAIMDALNNKCNSKSLVIFPGPVYNIQTNMTTLDLQDVVIYQFGRMLWSTDINYWLSVSMPVGFQNQSTVWYFGGNNVIWDGWGVGTLDGNGQVWYDWAKSQGNLAHRPMNINFRTLTNSVIRRLRFVQSQMWTMAITYSKHWSTLNTDGCDTIFSDSITFRRWIVSNGDDAIALKMNSSNIAVYDSYFENGQGIAIGSMGQYNGKYEYLENFYAKNITLKNTAHVSYLKTWAGISRGYPPNGGGGGYGVARNITIEDVKLIGGRQQPFFAWQCENYSGFAGQDCDSSLFKMEDVAWRRVSGTVQSGVTEAAYFQCSAAAGGCDNFEVTDFDVTHAGSDELLAIWDCFNVNGPQGFACT

SEQ ID NO: 21550 - protein, 206 aa, Hypocrea virens
MRLALFLYSLITFVKFSSSTVIVTITAAPAIPSGEPSYSNPTSFTSAILNSTNTYRRQYNASSLYWNTTLEKFATAYLQSDTTCRFAHSGGPYGENLAIGYANATAAVEAWGDEEEKYNFNDPGFTEQTGHFSQLVWKATRGVGCGRKLCGTRGWFVVCEYWPRGNVGGQYGEEVNKRVDGGGGTRLGGPIVAAIAIVLRLRNRES

SEQ ID NO: 21551 - protein, 780 aa, Hypocrea virens
MKLNSLVSFVAATAGVAQAASSDDLALFAKRRTADLAQFPDPTWFAKIDTWLSSQKADGTWSDVNYLSGCPAQRANWPIQEHWNRLITFGAAWSGVNPAVSSSWAKDPKLLAAVQKGLDYWFSNDYTPDDCMGNGGDASKGCPCNTPGLWNTNWYDQAILIPQLCSTACLLVKDANLTETQRAGCERIPYRAYALRDGTYGTGGRMTGANMVLVMQNSVTLALFTDNSTILADSMTRAMSVMTFIDDAGVDGIHRDGTFLQHDGLLYNGNYGKDLLNAFIQLEGEAIGTSFAADDNTREAMSTYIKGDEWMIYTDSQTRTEHWDFNAIGRFVSFPTVDLQASADINFNVSKLANAVADFTGPYAVNDTIRRLLSNGTEKLTGNKGFWASDYMVHRRPGYILTNKMISTRSSNSESVNGANPYAYHMGQGTLYSYVQGNEYKDIMAAWDWNLVPGTTTLLNQPKLQASQVKYDGLKDFVGVVSDGKFGAAVEDYLDPLTQNLSYRKSWFYVDEGVIVITTDIKKNATAGDAAVITVLDNRAAEPTKALLKTGPVSQAGEQHLTSDTLYYANNGYLSYDTPFQLTLSVGKRSGNWSEISTSTQGVKTVDIFSAYTTIKGSQFTYGYFPGISSKKLNKELEKPTWNPITKKGISGIYGKDRASLAFWPGGDKSVALDLKALGWSKAGTLTFKSDQPAVYLISAQCKDKKSMRLVVTLADPTQKLTVASYSIKISGQGHKVRDMGKKSEGLERRGDGGIGFGVRLPTGGLAGSSVSREVLLELD

SEQ ID NO: 21552 - protein, 102 aa, Hypocrea virens
MQFSAIIALFASLAIAAPAGETTTHELAARDGPCSSGVTNNVPKCCGTGVLDLLYLDCKTPTQATSVLNPLSAVCGRVGLQAKCCTAGIGSVGVLCQDALPE

SEQ ID NO: 21553 - protein, 110 aa, Hypocrea virens
MKFFTIATLLAAVAVAHPLEDAGLELRAGGDNNNTPTDRPHLCPQGLYSNAQCCDVFLLGIIGLDCKTPSGKVYDANDFRKECAKTGDKPLCCVAPVADQAILCQPALDV

SEQ ID NO: 21554 - protein, 242 aa, Hypocrea virens
MKAALFITSTIVGAASAFKARYYDGQEGACGCGSSSSGAASWQLGISSGVYTAAGSQALYDTAGASWCGAGCGKCYKLTSTGQAPCSTCGTGGVAGQSIIVMVTNLCPNNGNAQWCPTVGGTNQYGYSYHFDIMAKTPVFGDNVVVDFEPVVCPGQATSDWETCLCIDMQETDTTPVGLGDPGSPPSSSSSPPPATSSTPPSGGGTQVLFGQCGGIGWTGPTTCQPPATCKAQNQWYSQCLN

SEQ ID NO: 21555 - protein, 491 aa, Hypocrea virens
MARKLSLLALASLVSLSLQQNCAALFGQCGGIGWTSPTCCVAGAQCIYVNDFYSQCLASTGGGGSTTRSSTSSTSVSRSSSVGSSSGGGGSPTGGASTYTTTDTATVAPHSQSPYPSIAASSCGSWTLVDNVCCPSYCANDNTSEFCSGCGTCTTPPSADCKSGTMYPEVHHVTNNETWHYSRSTHFGLTSGGACGFGLYGLCTKGSVTANWTDPMLGSTCNAFCTAYPLLCKDPAGTTLRGNFAAPNGDYYSQFWSSLPGALDNYLSCGECIELIQTKPDGTDYVVGEAGYTDPITLEIVDSCPCSANSKWCCGPGADHCGEINFKYGCPLPADSIHLDLSDIAMGRLQGNGSLTNGVIPTRYKRVPCPKVGNVYIWLRNGGGPYYFALTAVNTNGPGSVTKIEIKGADTSTWVALVHDPNYTSSRPQERYGSWVIPQGSGPFNLPIAIRLTSPTGEQIVNEQAIKTFTPPATADPNFYYIDIGVQFSQN

SEQ ID NO: 21556 - protein, 239 aa, Hypocrea virens
MRTSLFIGSAIIGATSAYKATTTHYYDGQEGACGCGSSSGAFPWQLGIGNGVYTAAGSQAFFDTAGASWCGAGCGKCYKLTSTGEAPCSTCGTGGVAGQSIIVMVTNLCPNNGNAVWCPNVGGTNQYGYSYHFDIMAENQVFGDNVVVDFEPIACPGQAVADWGTCLCNGIQETDTTPVLGSDTSPPPPGTTSSTPPSSGGQKQTLYGQCGGIGWAGPTVCQPPATCKTQNPWYSQCLN

SEQ ID NO: 21557 - protein, 97 aa, Hypocrea virens
MKSFAAAVLFIAGILAAPSPNAKAIRSPLCPGGLESNPQCCSTDVLGIADLDCANPSSPVTDVQSFRAVCAAGGQRARCCAIPVAGQALLCESPVGI

SEQ ID NO: 21558 - protein, 298 aa, Hypocrea virens
MPSVKNALILLLGRALLAAGNPVDGERVVKRQCPGIHVFGARETTVGPGYGSSATVVNLVIAAHPGTTSEAISYPACGGQASCGGISYANSVVAGINAVVTAVNNFHNSCPDTQLVLVGYSQGGQIFDDALCGGGDPGEGYPNTAVPLSAGAVSAIKAAIFMGDPRNIHGLSYNVGTCTAQGFDPRPAGFVCPSASKIQSYCDAPDPYCCNGNDANTHQGYGQEYGQQALAFINSKLSSSGTPSGTPTSRPVASSTGSSPSATQTHYGQCGGIGYVGPTQCAAGFTCQVLNSYYSQCL

SEQ ID NO: 21559 - protein, 67 aa, Hypocrea virens
TGLFASPQCCATDVLGVADLDCIVPTTAPQNAASFQSTCAASGRRPRCCVLPVAGLGVLCTSPVGTQ

SEQ ID NO: 21560 - protein, 470 aa, Trichoderma koningii
MIVGILTTLATLATLAASVPLEERQACSSAWGQCGGQNWSGPTCCASGSTCVYSNDYYSQCLPGAASSSSSTRASSTTARASSTTSRSSATPPPGSSTTRVPPVGSGTATYSGNPFVGVTPWANAYYASEVSSLAIPSLTGAMATAAAAVAKVPSFMWLDTFDKTPLMEQTLADIRTANKNGGNYAGQFVVYDLPDRDCAALASNGEYSIADGGVDKYKNYIDTIRQIVVEYSDIRTLLVIEPDSLANLVTNLGTPKCANAQSAYLECINYAVTQLNLPNVAMYLDAGHAGWLGWPANQDPAAQLFANVYKNASSPRALRGLATNVANYNGWNITSPPSYTQGNAVYNEQLYIHAIGPLLANHGWSNAFFITDQGRSGKQPTGQQQWGDWCNVIGTGFGIRPSANTGDSLLDSFVWIKPGGECDGTSDSSAPRFDSHCALPDALQPAPQAGAWFQAYFVQLLTNANPSFL

SEQ ID NO: 21561 - protein, 471 aa, Trichoderma koningii
MIVGILTTLATLATLAASVPLEERQACSSVWGQCGGQNWSGPTCCASGSTCVYSNDYYSQCLPGAASSSSSTRAASTTSRVSPTTSRSSSATPPPGSTTTRVPPVGSGTATYSGNPFVGVTPWANAYYASEVSSLAIPSLTGAMATAAAAVAKVPSFMWLDTLDKTPLMEQTLADIRTANKNGGNYAGQFVVYDLPDRDCAALASNGEYSIADGGVAKYKNYIDTIRQIVVEYSDIRTLLVIEPDSLANLVTNLGTPKCANAQSAYLECINYAVTQLNLPNVAMYLDAGHAGWLGWPANQDPAAQLFANVYKNASSPRALRGLATNVANYNGWNITSPPSYTQGNAVYNEKLYIHAIGRLLANHGWSNAFFITDQGRSGKQPTGQQQWGDWCNVIGTGFGIRPSANTGDSLLDSFVWVKPGGECDGTSDSSAPRFDSHCALPDALQPAPQAGAWFQAYFVQLLTNANPSFL

SEQ ID NO: 21562 - protein, 470 aa, Trichoderma koningii
MIVGILTTLATLATLAASVPLEERQACSSVWGQCGGQNWSGPTCCASGSTCVYSNDYYSQCLPGAASSSSSTRASSTTARASSTTSRSSATPPPGSSTTRVPPVGSGTATYSGNPFVGVTPWANAYYASEVSSLAIPSLTGAMATAAAAVAKVPSSMWLDTFDKTPLMEQTLADIRTANKNGGNYAGQFVVYDLPDRDCAALASNGEYSIADGGVDKYKNYIDTIRQIVVEYSDIRTLLVIEPDSLANLVTNLGTPKCANAQSAYLECINYAVTQLNLPNVAMYLDAGHAGWLGWPANQDPAAQLFANVYKNASSPRALRGLATNVANYNGWNITSPPSYTQGNAVYNEQLYIHAIGPLLANHGWSNAFFITDQGRSGKQPTGQQQWGDWCNVIGTGFGIRPSANTGDSLLDSFVWIKPGGECDGTSDSSAPRFDSHCALPDALQPAPQAGAWFQAYFVQLLTNANPSFL

SEQ ID NO: 21563 - protein, 397 aa, Hypocrea virens
MVRSLAYVGALLAALPSARAGFNASSTQNIAVYWGQNSANQANSQQRLSTYCANADIDIIPIGFMNGISPVITNFANAGNNCTAFPDNANALDCPQIEEDIITCQKTYGKTILISLGGGSYSQGGFSSASAATSAAQTVWNMFGPVNPNSTVDRPFGSAVVDGVDFDFESGVNNLATFATELRSLMDASASSANRKFYLSAAPQCVYPDYADNPALNGVVSFDFIMIQYYNNGCGVSSYVPGATTQWNYNFDVWDNWAHTVSKNPNVKILLGIAANTGAASGYVSGTQLSAVISFTKQYSSFAGIMMWDMSQLYENSGFLDQVVSDLAAPGSSPPATTSTGGSKPTSTSGGSTGPTGGGGGTVPQWGQCGGEGYTGPTQCQSPYKCVVSSTWWASCQ

SEQ ID NO: 21564 - protein, 93 aa, Hypocrea virens; identical to SEQ ID NO: 21514

SEQ ID NO: 21565 - protein, 102 aa, Hypocrea virens; identical to SEQ ID NO: 21552

SEQ ID NO: 21566 - protein, 223 aa, Hypocrea virens
MNLSICESNSVPITPFPLPHPKSCLFCFKPILQGDCLPILTMKLLAITALFIAGTLAVPASSYPPPPPEYGDGHKGDVGYGGDHGGDHGKDHGKDHGGHYPGDPNYPPPPPPGYHNGGSDKPPTDGDGYPSDGGDDGDDSDGGGHGGDRENDPSDLCPTLLYSNPQCCSASVLNIADLDCEPPRKRPSRKHDFKQICAAQGSDAKCCVLPLLGLGILCTDAIV

SEQ ID NO: 21567 - protein, 87 aa, Hypocrea virens
MNMKLLILAGIFTTGAFASIPCSGNQNTPLCCAVDVLGVASLDCQPPPGPVNSSEDLQQQCRSVGLESKCCALSLLGQAIGCTNPGN

SEQ ID NO: 21568 - protein, 45 aa, Hypocrea virens
TPPVAPSKCKSFGSVCAAIGLQPKCCVLPVAGVAVLCTDPLPPAF

SEQ ID NO: 21569 - protein, 158 aa, Hypocrea virens
MKFLAVTTVFFAAVLAAPGLYYPPPPPDYTLPGNGGNGNGHGNGNGNGNGNGNGNGNGNGNGNGNGNGNGNGNGDGNGNGNGNGGASALCPTGLFASPQCCATDVLGVADLDCIVPTTAPQNAASFQSTCAASGRRPRCCVLPVAGLGVLCTSPVGTQ

SEQ ID NO: 21570 - protein, 97 aa, Hypocrea virens; identical to SEQ ID NO: 21557

SEQ ID NO: 21571 - protein, 94 aa, Hypocrea virens; identical to SEQ ID NO: 21515

SEQ ID NO: 21572 - protein, 102 aa, Hypocrea virens; identical to SEQ ID NO: 21516

SEQ ID NO: 21573 - protein, 505 aa, Hypocrea virens
MYQKLAVISAFLAAARAQQVCTQQAETHPPLTWQKCSSSGCTAQSGSVVLDANWRWTHDVKSTTNCYDGNTWSKTLCPDDATCAKNCCLDGAAYSSTYGITTSSDSLTINFVTQSNVGARLYLMATDTSYQEFTLSGNEFSFDVDVSQLPCGLNGALYFVSMDADGGQSKYPTNAAGAKYGTGYCDSQCPRDLKFINGQANVDGWQPSSNNANTGIGGHGSCCSEMDIWEANSISQAVTPHPCETVGQTMCSGDGCGGTYSSDRYGGTCDPDGCDWNPYRLGNTTFYGPGSGFTLDTTKKMTVVTQFATSGAISRYYVQNGVKFQQPNAQLSGYSGNTLNSDYCAAEQAAFGGTSFTDKGGLTQFNKALSGGMVLVMSLWDDYYANMLWLDSTYPTNATASTPGAKRGSCSTSSGVPSQIESQSPNAKVVFSNIRFGPIGSTGGSTGNPPPGTSTTRLPPSSTGSSPGPTQTHYGQCGGIGYSGPTQCVSGTTCQVLNPFYSQCL

SEQ ID NO: 21574 - protein, 110 aa, Hypocrea virens; identical to SEQ ID NO: 21553

SEQ ID NO: 21575 - protein, 514 aa, Trichoderma sp.
MYRKLAVISAFLATARAQSACTLQTETHPSLTWQKCSSGGTCTQQTGSVVIDANWRWTHATNSSTNCYDGNTWSSTLCPDNETCAKNCCLDGAAYASTYGVTTSADSLSIGFVTQSAQKNVGARLYLMASDTTYQEFTLLGNEFSFDVDVSQLPCGLNGALYFVSMDADGGVSKYPTNTAGAKYGTGYCDSQCPRDLKFINGQANVEGWEPSSNNANTGIGGHGSCCSEMDIWEANSISEALTPHPCTTVGQEICEGDGCGGTYSNDRYGGTCDPDGCDWNPYRLGNTSFYGPGSSFTLDTTKKLTVVTQFETSGAINRYYVQNGVTYKQPNAELGSYSGNELNDDYCTAEESEFGGSSFSDKGGLTQFKKATSGGMVLVMSLWDDYYANMLWLDSTYPTNETSSTPGAVRGSCSTSSGVPAQLESQSPNAKVVYSNIKFGPIGSTGNPSGGNPPGGNPPGTTTTRRPATTTGSSPGPTQTHYGQCGGIGYSGPTVCASGTTCQVLNEYYSQCL

SEQ ID NO: 21576 - protein, 470 aa, Trichoderma sp.
MIVGILTTLATLATLAASVPLEERQACSSVWGQCGGQNWSGPTCCASGSTCVYSNDYYSQCLPGAASSSSSTRASSTTARASSTTSRSSATPPPGSSTTRVPPVGSGTATYSGNPFVGVTPWANAYYASEVSSLAIPSLTGAMATAAAAVAKVPSFMWLDTFDKTPLMEQTLADIRTANKNGGNYAGQFVVYDLPDRDCAALASNGEYSIADGGVDKYKNYIDTIRQIVVEYSDIRTLLVIEPDSLANLVTNLGTPKCANAQSAYLECINYAVTQLNLPNVAMYLDAGHAGWLGWPANQDPAAQLFANVYKNASSPRALRGLATNVANYNGWNITSPPSYTQGNAVYNEQLYIHAIGPLLANHGWSNAFFITDQGRSGKQPTGHQQWGDWCNVIGTGFGIRPSANTGDSLLDSFVWIKPGGECDGTSDSSAPRFDSHCALPDALQPAPQAGAWFQAYFVQLLTNANPSFL

SEQ ID NO: 21577 - protein, 392 aa, Trichoderma ghanense
MPSFSSFTSALGLLSLLPAARAGWDQNSNKNIVVYWGQNSGSVGQNRLSYYCQNAPDVDVINISFMVGINNLNLNLANVGNNCTAFPEAPNLLNCPQVAADITECQQTYGKTIMMSLFGSTYSESGFSSSSAAVSAAQEMWAMYGPVQSGNSTPRPFGDAVVDGFDFDLEDPIENNMEPFAAELRSLIDASTSKKFYLSAAPQCPYPDASDQSFLDGQVAFDWVNVQFYNNGCGVSHFPADFNWATWDNWAKTVSANKNAKVLIGTPANVGGANAGSFPTDSQLSGAISLAQGSSSFGGVMLWDMAQLFTNQGYLAKIVADLGSSSSPPPPASTTLQTVTRSSTASTSPTNPPSGGSVPQWGQCGGNGYTGPTQCQAPYKCVATSEWWSSCQ

SEQ ID NO: 21578 - protein, 394 aa, Trichoderma ghanense
MFFSKALAAAGLLATAAFAAPTMEKRAAGGKLVVYWGAEDDSTTLANVCADPSYDIVNLAFLSRFFAGGGYPELSLSSLGGASAAQKAAGATNLQDGTSLIPAIQACQAAGKLVILSMGGAVDYSAVTLTGDAQGQQLADTVWNLFLGGTANPTLRPFGSVKLDGVDLDNETGNPTGYLAMAQRFKSNFAKDPSKKYYLTAAPQCPFPDASEPLNVCQLADYIWVQFYNNGNCNIAQSGFNSAVKNWSKSIGNATLFIGALASGADGDQGYVSASSLLSAYQGVSALNLPNIGGIMLWEAQLAVKNGNFQKTVKAGISSGSTTPPPPSPSGSCSWAGHCAGASCSTDDDCSDDLTCNSGVCGTAGSTPAPTCSWEGHCLGASCGNDNDCSDPYS

SEQ ID NO: 21579 - protein, 495 aa, Trichoderma asperellum
MLRRLSLLVLAGLVSRSAQQSCAALYGQCGGIGWSGATCCVSGAQCNALNDYYSQCVLSTGGSGPTGSSSSATSIPHSQSLSSASSIPHSQSSSVGQSTGVSTYTTTDTSTVALHSQSPYPSIAASSCGAWTLVDNVCCPSYCATDDTSESCTCSDCTTPPSADCKSGTMYPEVHTVSTNETWHYSRSTHFGLTSGGACGFGLYGLCTKGSVTANWTDPMLGTTCDAFCTAYPLLCKDPAGTTLRGNFAAPNGDYYTQFWPSLTGDLDNYLSCGECIELIQTKPDGTDYAVGEAGYTDPITLEIVDSCPCSANSKWCCGPGADHCGEIDFKYGCPLPADSIHLDLSDIAMGRLQGNGSLNNGVIPTRYRRVQCPKLGNVYIWLRNGGGPYYFALTAVNTNGPGSVTKIEVKGSDSSTWVPLEHDPNYTSSRPQERYGSWVIPQGSGPFNLPVGVRLTSPTGEQIVNEQAIKTFTPPATADPNFYYIDIGVQFSRN

SEQ ID NO: 21580 - protein, 418 aa, Trichoderma sp.
MNKSVAPLLLAASTLVGGVAAQQTVWGQCGGIGWGGPTNCAPGSACSTLNSYYAQCIPGATSMTTSTRPPSGPTTTTRATSTTSSTPPTSSGDRFVGVNVAGFDFGCSTDGTCVTSKVYPPLKNFTGSNNYPDGIGQMQHFVNDDGMTIFRLPVGWQYLVNNNLGGPLDPTSISKYDQLVQGCLSLGVYCIVDIHNYARWNGGIIGQGGPTNAQFTSLWSQLASKYASQSRVWFGIMNEPHDVNINTWAATVQEVVTAIRNAGATSQYISLPGNDWQSAAAFISDGSAAALSQVTNPDGSTTNLIFDLHKYLDSDNSGTHAECTTNNIDGAFAPLATWLRQNNRQAILTETGGGNVQSCIQYLCQQVQYLNQNSDVYLGYVGWGAGSFDNTYVLTETPTGSGNSWTDTSLVSSCLARK

SEQ ID NO: 21581 - protein, 461 aa, Trichoderma sp.
MAPSVTLPLTTAMLALVRLVAAQQPGTSTPEVHPKLTTYKCTTSGGCVAQDTSVVLDWNYRWMHDANYNSCTVNGGVNTTLCPDEATCGKNCFIEGVDYAASGVTASGSTLTLNQYMPSSSGGYSSVSPRLYLLGPDGEYVMLKLNGQELSFDVDLSALPCGENGSLYLSQMDENGGANQYNTAGANYGSGYCDAQCPVQTWRNGTLNTSGQGFCCNEMDILEGNSRANALTPHSCTATACDSAGCGFNPYGSGYPNYFGPGDTVDTSKPFTIITQFNTDNGSPSGNLVSITRKYRQNGVDIPSAKPGGDTISSCPSASAYGGLATMGKALSSGMVLIFSIRNDNSQYMNWLDSGSAGPCSSTEGNPSNILANNPGTHVVYSNIRWGDIGSTTNSTGGNPPPPPASSTTFSTTRRSSTTSSSPSCTQTHWGQCGGIGYTGSKTCTSGTTCQYGNDYYSQCL

SEQ ID NO: 21582 - protein, 347 aa, Trichoderma sp.
MIQKLSNLLLTALAVATGVVGHGHINNIVVNGVYYQGYDPTSFPYESDPPIVVGWTAADLDNGFVSPDAYQSPDIICHKNATNAKGHASVKAGDTIPLQWVPVPWPHPGPIVDYLANCNGDCETVDKTSLEFFKIDGVGLISGGDPGNWASDVLIANNNTWVVKIPEDLAPGNYVLRHEIIALHSAGQADGAQNYPQCFNLAVPGSGSLQPSGVKGTALYHSDDPGVLINIYTSPLAYTIPGPSVVSGLPTSVAQGSSAATATASATVPGGSGPGNPTSKTTTTARTTQASSSRASSTPPATTSAPGGGPTQTLYGQCGGSGYSGPTRCAPPATCSTLNPYYAQCLN

SEQ ID NO: 21583 - protein, 401 aa, Hypocrea jecorina
MLSRTLLTALGLTTIAAAAPSQTVKTRQAPGGQNAVYWGATNNENDNLSTYCTASSGIDIVILSFLDIYGATGNFPSGNMGNSCYVGTNGVPQLCDDLASSIATCQAAGIKVIISLGGAASSYSLQSQSQAVAIGQYLWNAYGNSGNTTVQRPFGNVFVNGFDFDIELNAGSQYYQYLISTLRSNFANDPKNTYYITGAPQCPIPEPNMGEIISTSQFDYLWVQFYNNNPVCSLGLPGDAPFNFNDWVSFISTTPSKNAKLFVGAPASTLGANGNAGGAKYYATPEQLAGIVNSVKSSPFFGGIMLWDAGYSDSNVNNGCNYAQEAKNILLTGTACGGESSPPPSTTTTAVPPPASSTPSNPSGGSVPQWGQCGGDGYTGPTQCVAPYKCVATSEWWSSCQ

SEQ ID NO: 21584 - protein, 392 aa, Hypocrea jecorina
MPSISSFTSALGLLSLLPAARAGWNQNSNDNIVVYWGQNSGSVGQNRLSYYCQNAPDVDVINISFMVGITNLNLNLANVGNNCTAFPQAPNLLNCPQVAADIIECQQTYGKTIMMSLFGSTYSESGFSSSSAAVAAAQEIWAMYGPVQSGNSTPRPFGDAVVDGFDFDLEDPIENNMEPFAAELRSLIDASTSKKFYLSAAPQCPYPDVSDESFLDGQVPFDWVNVQFYNNGCGVSHYPADFNWATWDNWAKTVSANKNAKVLIGTPANVGGANAGSFPTDSQLSGAISLAKGSSSFGGVMLWDMAQLFTNQGYLAKIVADLGSASSPPPPASTTLQTITRSSTASTGPTNPPSGGSVPQWGQCGGNGYTGPTQCQAPYKCVATSEWWSSCQ

SEQ ID NO: 21585 - protein, 418 aa, Hypocrea jecorina
MNKSVAPLLLAASILYGGAVAQQTVWGQCGGIGWSGPTNCAPGSACSTLNPYYAQCIPGATTITTSTRPPSGPTTTTRATSTSSSTPPTSSGVRFAGVNIAGFDFGCTTDGTCVTSKVYPPLKNFTGSNNYPDGIGQMQHFVNEDGMTIFRLPVGWQYLVNNNLGGNLDSTSISKYDQLVQGCLSLGAYCIVDIHNYARWNGGIIGQGGPTNAQFTSLWSQLASKYASQSRVWFGIMNEPHDVNINTWAATVQEVVTAIRNAGATSQFISLPGNDWQSAGAFISDGSAAALSQVTNPDGSTTNLIFDVHKYLDSDNSGTHAECTTNNIDGAFSPLATWLRQNNRQAILTETGGGNVQSCIQDMCQQIQYLNQNSDVYLGYVGWGAGSFDSTYVLTETPTGSGNSWTDTSLVSSCLARK

SEQ ID NO: 21586 - protein, 411 aa, Hypocrea jecorina
MFFTKAVGGLGLLASLASSAPNPIARRQAPGAQNVVYWGQNGGGTVENNDLSAYCTPTSGIDIIVLSFLYQWGQGSSALGGTIGQSCGITTSGEPQNCDALTAAITKCKTAGVKIILSLGGASAFSSFQTADQAAQAGQYLWNAYGGGSGVTRPLGNNVMDGFDLDIESNPGTNENYAALVSALRSNFASDPSRQYVISGAPQCPLPEPNMGVIIQNAQFDYLWVQFYNNNEYPGDPCSLGLPGDAPFNFNNWTTFIQSTPSKDAKVFVGVPAAPLAANGAPSGEVYYATPSQLADIVNDVKSNPAFGGIMMWSAGFSDTNVNDGCNYAQEAKNILLTGSPCSSGPVSVSRPPVSSPTITSSPPGTSPAPPSQTGSVPQWGQCGGNGYTGPTQCVAPFKCVATSEWWSQCE

SEQ ID NO: 21587 - protein, 437 aa, Hypocrea jecorina
MMMLSKSLLSAATAASALAAVLQPVPRASSFVTISGTQFNIDGKVGYFAGTNCYWCSFLTNHADVDSTFSHISSSGLKVVRVWGFNDVNTQPSPGQIWFQKLSATGSTINTGADGLQTLDYVVQSAEQHNLKLIIPFVNNWSDYGGINAYVNAFGGNATTWYTNTAAQTQYRKYVQAVVSRYANSTAIFAWELGNEPRCNGCSTDVIVQWATSVSQYVKSLDSNHLVTLGDEGLGLSTGDGAYPYTYGEGTDFAKNVQIKSLDFGTFHLYPDSWGTNYTWGNGWIQTHAAACLAAGKPCVFEEYGAQQNPCTNEAPWQTTSLTTRGMGGDMFWQWGDTFANGAQSNSDPYTVWYNSSNWQCLVKNHVDAINGGTTTPPPVSSTTTTSSRTSSTPPPPGGSCSPLYGQCGGSGYTGPTCCAQGTCIYSNYWYSQCLNT

SEQ ID NO: 21588 - protein, 471 aa, Hypocrea jecorina; identical to SEQ ID NO: 21561

SEQ ID NO: 21589 - protein, 459 aa, Hypocrea jecorina
MAPSVTLPLTTAILAIARLVAAQQPGTSTPEVHPKLTTYKCTKSGGCVAQDTSVVLDWNYRWMHDANYNSCTVNGGVNTTLCPDEATCGKNCFIEGVDYAASGVTTSGSSLTMNQYMPSSSGGYSSVSPRLYLLDSDGEYVMLKLNGQELSFDVDLSALPCGENGSLYLSQMDENGGANQYNTAGANYGGGYCDAQCPVQTWRNGTLNTSHQGFCCNEMDILEGNSRANALTPHSCTATACDSAGCGFNPYGSGYKSYYGPGDTVDTSKTFTIITQFNTDNGSPSGNLVSITRKYQQNGVDIPSTQPGGDTISSCPSASAYGGLATMGKALSSGMVLVFSIWNDNSQYMNWLDSGNAGPCSSTEGNPSNILANNPNTHVVFSNIRWGDIGSTTNSTAPPPPPASSTTFSTTRRSSTTSSSPSCTQTHWGQCGGIGYSGCKTCTSGTTCQYSNDYYSQCL

SEQ ID NO: 21590 - protein, 471 aa, Hypocrea jecorina
MIVGILTTLATLATLAASVPLEERQACSSVWGQCGGQNWSGPTCCASGSTCVYSNDYYSQCLPGAASSSSSTRAASTTSRVSPTTSRSSSATPPPGSTTTRVPPVGSGTATYSGNPFVGVTPWANAYYASEVSSLAIPSLTGAMATAAAAVAKVPSFMWLDTLDKTPLMEQTLADIRTANKNGGNYAGQFVVYDLPDRDCAALASNGEYSIADGGVAKYKNYIDTIRQIVVEYSDIRTLLVIEPDSLANLVTNLGTPKCANAQSAYLECINYAVTQLNLPNVAMYLDAGHAGWLGWPANQDPAAQLFANVYKNASSPRALRGLATNVANYNGWNITSPPSYTQGNAVYNEKLYIHAIGPLLANHGWSNAFFITDQGRSGKQPTGQQQWGDWCNVTGTGFGIRPSANTGDSLLDSFVWVKPGGECDGTSDSSAPRFDSHCALPDALQPAPQAGAWFQAYFVQLLTNANPSFL

SEQ ID NO: 21591 - protein, 459 aa, Hypocrea jecorina
MAPSVTLPLTTAILAIARLVAAQQPGTSTPEVHPKLTTYKCTKSGGCVAQDTSVVLDWNYRWMHDANYNSCTVNGGVNTTLCPDEATCGKNCFIEGVDYAASGVTTSGSSLTMNQYMPSSSGGYSSVSPRLYLLDSDGEYVMLKLNGQELSFDVDLSALPCGENGSLYLSQMDENGGANQYNTAGANYGSGYCDAQCPVQTWRNGTLNTSHQGFCCNEMDILEGNSRANALTPHSCTATACDSAGCGFSPYGSGYKSYYGPGDTVDTSKTFTIITQFNTDNGSPSGNLVSITRKYQQNGVDVPSAQPGGDTISSCPSASAYGGLATMGKALSSGMVLVFSIWNDNSQYMNWLDSGNAGPCSSTEGNPSNILANNPNTHVVFSNIRWGDIGSTTNSTAPPPPPASSTTFSTTRRSSTTSSSPSCTQTHWGQCGGIGYSGCKTCTSGTTCQYSNDYYSQCL

SEQ ID NO: 21592 - protein, 493 aa, Hypocrea jecorina
MAGKLILVALASLVSLSIQQNCAALFGQCGGIGWSGTTCCVAGAQCSFVNDWYSQCLASTGGNPPNGTTSSSLVSRTSSASSSVGSSSPGGNSPTGSASTYTTTDTATVAPHSQSPYPSIAASSCGSWTLVDNVCCPSYCANDDTSESCSGCGTCTTPPSADCKSGTMYPEVHHVSSNESWHYSRSTHFGLTSGGACGFGLYGLCTKGSVTASWTDPMLGATCDAFCTAYPLLCKDPTGTTLRGNFAAPNGDYYTQFWSSLPGALDNYLSCGECIELIQTKPDGTDYAVGEAGYTDPITLEIVDSCPCSANSKWCCGPGADHCGEIDFKYGCPLPADSIHLDLSDIAMGRLQGNGSLTNGVIPTRYRRVQCPKVGNAYIWLRNGGGPYYFALTAVNTNGPGSVTKIEIKGADTDNWVALVHDPNYTSSRPQERYGSWVIPQGSGPFNLPVGIRLTSPTGEQIVNEQAIKTFTPPATGDPNFYYIDIGVQFSQN

SEQ ID NO: 21593 - protein, 316 aa, Hypocrea jecorina
MVRRTALLALGALSTLSMAQISDDFESGWDQTKWPISAPDCNQGGTVSLDTTVAHSGSNSMKVVGGPNGYCGHIFFGTTQVPTGDVYVRAWIRLQTALGSNHVTFIIMPDTAQGGKHLRIGGQSQVLDYNRESDDATLPDLSPNGIASTVTLPTGAFQCFEYHLGTDGTIETWLNGSLIPGMTVGPGVDNPNDAGWTRASYIPEITGVNFGWEAYSGDVNTVWFDDISIASTRVGCGPGSPGGPGSSTTGRSSTSGPTSTSRPSTTIPPPTSRTTTATGPTQTHYGQCGGIGYSGPTVCASGTTCQVLNPYYSQCL

SEQ ID NO: 21594 - protein, 460 aa, Hypocrea jecorina
MASRFFALLLLAIPIQAQSPVWGQCGGIGWSGPTTCVGGATCVSYNPYYSQCIPSTQASSSIASTTLVTSFTTTTATRTSASTPPASSTGAGGATCSALPGSITLRSNAKLNDLFTMFNGDKVTTKDKFSCRQAEMSELIQRYELGTLPGRPSTLTASFSGNTLTINCGEAGKSISFTVTITYPSSGTAPYPAIIGYGGGSLPAPAGVAMINFNNDNIAAQVNTGSRGQGKFYDLYGSSHSAGAMTAWAWGVSRVIDALELVPGARIDTTKIGVTGCSRNGKGAMVAGAFEKRIVLTLPQESGAGGSACWRISDYLKSQGANIQTASEIIGEDPWFSTTFNSYVNQVPVLPFDHHSLAALIAPRGLFVIDNNIDWLGPQSCFGCMTAAHMAWQALGVSDHMGYSQIGAHAHCAFPSNQQSQLTAFVQKFLLGQSTNTAIFQSDFSANQSQWIDWTTPTLS

SEQ ID NO: 21595 - protein, 346 aa, Trichoderma saturnisporum
MIQKLSNLLVAALTVATGVVGHGHINNIVINGVYYQAYDPTSFPYESNPPIVVGWTAADLDNGFVSPDAYGSPDIICHKNATNAKGHASVRAGDTVLFQWVPLPWPHPGPIVDYLANCNGDCETVDKTSLEFFKIDGVGLISGGDPGNWASDVLIANNNTWVVKIPDDLAPGNYVLRHEIIALHSAGQANGAQNYPQCFNLAVSGSGSLKPSGVKGTALYHATDPGVLINIYTSPLNYIIPGPTVVSGLPTSVAQRSSAATATASATLPGGGGSPPGGPTSRPTTTARSTSQASSRPSPPATTSAPAGGPTQTLYGQCGGSGYSGPTRCAPPATVSTLNPYYARLN

SEQ ID NO: 21596 - protein, 418 aa, Hypocrea jecorina; identical to SEQ ID NO: 21493

SEQ ID NO: 21597 - protein, 847 aa, Hypocrea jecorina; identical to SEQ ID NO: 21457

SEQ ID NO: 21598 - protein, 392 aa, Hypocrea jecorina; identical to SEQ ID NO: 21584

SEQ ID NO: 21599 - protein, 411 aa, Hypocrea jecorina; identical to SEQ ID NO: 21586

SEQ ID NO: 21600 - protein, 401 aa, Hypocrea jecorina; identical to SEQ ID NO: 21583

SEQ ID NO: 21601 - protein, 629 aa, Hypocrea jecorina
MPTAVRICVCGDESTGKSSLIAALVKDQFMTTKIQPVLPQISIPPSIGTPENVTTTIVDTSARPQDRETLRKEIRKCNVILLVYADHYSYERVALFWMPYFRSLGVNVPVVLCANKSDLVGQGSTSQVVEEEMMPVMAEFREIDSCIRTSAREHRNVNEVFFLCQKAVTHPIAPLFDYKEGRLKPSCVDALKRIFYLCDKNQDGYLDNQEMRDFQSRCFDKPLTDDDLDNIKLSISKSLRGAVDLSKGIDLKGFVQLNKMYAEKGRHETIWIILRKFHHTDSLSLEENFLHPKFEVPEFCSAELSPAGYRFFVDLFLLFDKDNDGGLNDQELEALFAPTPGLPPSWADSAFPSSTVRNEGGYITLQGWLAQWSMTTFLEPKTTLEYLAYLGFEPPNPKDPITSALKITKPRKRRRRPGRVERNVFHCYILGAAGAGKSSLLDAFLNRPFDELYHPTIKPRRAVNSVELPGGKQVYLIFEELGELEPAILENQAKLDACDLVCYAYDSSDPDSFSHIVDIRKKYPQLDQLPSVYTALKADKDKTMQRSELQPDQYTASLNMSSPLHVSVTWNSISELFVALAEAAANPSTAFPKSDDDTPDRTSLYLTLGATACAAIAAVMIWRRSTNTM

SEQ ID NO: 21602 - protein, 204 aa, Hypocrea jecorina
MPIGDTITAACDLISDGEDAAASLFGISETENDPCGDVTVLFARGTCDPGNVGVLVGPWFFDSLQTALGSRTLGVKGVPYPASVQDFLSGSVQNGINMANQIKSVLQSCPNTKLVLGGYSQGSMVVHNAASNLDAATMSKISAVVLFGDPYYGKPVANFDAAKTLVVCHDGDNICQGGDIILLPHLTYAEDADTAAAFVVPLVS

SEQ ID NO: 21603 - protein, 460 aa, Hypocrea jecorina; identical to SEQ ID NO: 21594

SEQ ID NO: 21604 - protein, 101 aa, Hypocrea jecorina
MQYSAIVALFATLAVAAPAQEAAADIAILDGPCTAGVTNNIPMCCGSGILDLLYLDCETPTQATSVLNPLSAVCGRVGLQAKCCTLGIADLGVLCQDALPE

SEQ ID NO: 21605 - protein, 316 aa, Hypocrea jecorina; identical to SEQ ID NO: 21593

SEQ ID NO: 21606 - protein, 344 aa, Hypocrea jecorina; identical to SEQ ID NO: 21469

SEQ ID NO: 21607 - protein, 493 aa, Hypocrea jecorina; identical to SEQ ID NO: 21592

SEQ ID NO: 21608 - protein, 160 aa, Hypocrea jecorina
TVTAAPAIPSNEPSYANPSSFTSAVLNSTNTYRRQYNASSVHWNTTLEKFASAYLANDTTCKFAHSGGPFGENIAIGYPNATAAVEAWGNEDKEYNFAKPGFTEETGHFSQLVWKDTRAVGCGRKLCGERGWFVVCEYWPRGNVGGEYKDEVGRRVDGVE

SEQ ID NO: 21609 - protein, 97 aa, Hypocrea jecorina; identical to SEQ ID NO: 21477

SEQ ID NO: 21610 - protein, 260 aa, Hypocrea jecorina
MKLLAVTALLVAGSLAVPAGSYPPPPPTYGDDPSGEVGHPPEYPPDYSSQYPEYPPGHGGKDDGDEDSYTPPSTTLSPSYPTSVGGDKSSYPPPSSTPYPPPEADGDGGNNNSGNNSGDNNGDDNDDNNGDDDDDNNGDDDDDDNDNGDDDDDNVPGAPEQPPTDGDSDSPDNGTGGDGTVGGGDDGDGEDNASDLCPGILYASPQCCDTSVLGLLDLSCEPPRSAPADVEAFNDICQEVGAKAQCCVLPVALLCEDVPN

SEQ ID NO: 21611 - protein, 640 aa, Hypocrea jecorina
MKSAILLGLTGLAANVHAHPTKQHDSGSNLVRRGIDISKYHLPSLSDYTPSTHVDVEDEASLQSVDLKRDYVATATRAVKRLAPHAKFRVVDDHYVDVDGIGHVHFKQTVHGIDIDNADFKVNVGRNGRVFSHGNSFFTGKLPTENPLTKRAFSEPTEALKGAVDILGLPVKADGATAEPTEGTEKYVLKGTSGAVSDPEARLVYLVKADGTLSLTWRVETDVVDNWLLTYVDAATNQEVHGVVDYVADFATYEVYPFGVNDPSEGDRKTFTDPWRIDASPFTWLGDGTTNYTTTRGNNAIAQVNPTGGNDYLNNYRPSSPSRTFEYPFSLTQTNPVDYRDFSVTQLFYTANKYHDLLYLLGFTEAAGNFQVNNNGKGGKGNDFVILNAQDGSGTNNANFATPADGSSGRMRMYIWTVSTPRRDGSLEEGIVIHEFTHGLSNRLTGGPANSGCLSGLEAGGMGEGWGDFYATAIRLKPSDTHSTNYPMGAWADNNPAGIRQYPYSTSLTTNPLTYKSVNSQSEVHSAGTTWASILYEVLWALIDKHGKNDAEFPTFDSQGVPTDGKFLALKLVLNGLALQPCTPTFVSARDAIIDADRALTGGDNVCELWTAFAKRGLGSGAKYSSSSRTESFTVPSGVC

SEQ ID NO: 21612 - protein, 782 aa, Hypocrea jecorina
MKVNSLVSLAAAAAGVARAASSSDDDLALFAKRRTADLAQFPDPTWFAKIDTWLSSQKDDGTWSDVNYLSGCPAQRANWPIQEHWNRLITFGAAWSGVNPVVSSSWAKDPKLLAAVQKGLDYWFSNDYTPADCMGDGGDASKGCPCGTPGLWNTNWYDQAILIPQLCSTACLLVKDANLTETQRAGCERIPYRAYALRDGTYGTGGRMTGANMVLVMQNSVTLALFTDNSTILADSMTRAMSVMTFEDTAGADGIHRDGTFLQHDGLLYNGNYGKDLLNAFIQLEGEAIGTSFAADDDTREAMSTYIKGDEWMIYTDSETKTEHWDFNAIGRFVSFPTVDLQASADINFNVSKLAAAVADFTGSYAVNDTIRRLLSNGTEKLTGNKGFWASDYMVHRRPNFVLTNKMLSTRSANSESVNGANPYAYHMGQGTLYSYVTGTEYKDIMGAWDWNLVPGTTTLLDQPKLQASQVKYDGLKDFVGVVSDGKFGAAVEDYVDPLTQNLAYRKSWFFVDEGVIVITTDIKKNATAGNAPVITVLDNRAAESSKTKAFVKNGPLAKSGAVQHVATDTLYYANNGYLAYDTPFELTLSVGKRSGNWSEISTSTQGVETVDIFSAYTTIKGDKFTYGFFPSISSQKLNKELLEPTWTPITKKGISGIYGKDRASLAFWPGGAKSVELDLKDLGWASAGTLTFTSDQPAVYLLSAKCKDKGSLRLSVTLADPTQKLGAASYSIKISGQKHKVREMGKLSEGIERRGDGAIGFGVRLPTGGLAGSSRAEYSGT

SEQ ID NO: 21613 - protein, 379 aa, Hypocrea jecorina
MLKLSLFLGAVTASLCVQAHAVPPPTVTQAPKLEDRATTCTFSGSNGASSASKSQKSCATIVLSNVAVPSGVTLDLSDLNDGTTVIFEGTTTWGYKEWSGPLLQIEGNDITIQGASGAVLNPDGARWWDGQGGNGGKTKPKFFAAHDLTSSSITNLYIKNTPVQAVSVNGVNGLTITGMTIDNSAGDSGGGHNTDGFDIGSSSNVVISGAKVYNQDDCVAVNSGTNITFTGGLCSGGHGLSIGSVGGRDDNTVQTVTFSNSQVTKSANGIRIKATAGKTGTIKGVTYTGITLSSITGYGILIEQNYDGGDLHGSPTSGIPITNLVLQNISGSNGVVSSGNNIAIVCGSGACSNWTWSNVVVTGGKKYGSCQNVPSPATC

SEQ ID NO: 21614 - protein, 459 aa, Hypocrea jecorina; identical to SEQ ID NO: 21465

SEQ ID NO: 21615 - protein, 1361 aa, Hypocrea jecorina
MVMRMRSLSQRMPSWSKSTKQKNRLSKSDGRFSTSTDRMNSLELNDPSNLQEEESFQLVAGGTSDQLRWLEIDNGVKKEDDDTPSELTPSEDVSNAEPAGEDAEADDEAATNGVNGDSEIVNGETPNGETPNGVTPNGETANGETVNGETAGETPASEAAPSLRSRTTSFKAVSVKTASERVNLDDATDVDPDEVTNYVLQCHDDVNDHLRQINDALNLISIMGPTRSGKSTLMNLLAGCTDEPLFSTSPGAESWTRGTNLGNKIMGVKEFSRLDDGVEVPMNTNQKVAFLDTEGHGDQGDLYDIMLFTPAVLCSRVIVFNTTDVAKDTILTSLAMMTLAADKLNFGGDKKTTGPKFGQLVIIINKYDLGGSVDDVRKNILRKEIGRTEAIKRRNKIREKLAAEFEDVTTPQVHVLRGNSLKEGVQAKINDKTKEFLVLDDFNDSYVKDFKNLRAQLSQMLRTPRLVAGAPLTGASTADFVSSIVKSINRLEQNGQLHVPDIWRAAENEAINRSHIKFHHDFREACNRLAQDTSLISTKECNKKLDRITQKCMTDVRGSLRYLTQQTIRDTCASLTKESEGQRNEVLAANLQKIEAFAEKELTELVGSIQDTLTDAVSNFKTISVDTADKLLDQLHGDLLEKYKKKIASYDEQALVRNYSVTYDRAFFTAAAMARQNLNIAWASWLVELDTTSAEQIAAALEKLYQESLVGDESIWETRADEELSSHLSNYYNTIDTEYLWDNAAAIKANYTEKANNAKNLVAAKVAVREQEMAKLVEQELEKYLAAYQRQLDESLLPKEDVGDFKAITDTTACRSELIAFLKEQPMSTRLYDHYLNQFDNQLSAKKSAFGDKYTAVLKEFLSYIEEELDRIVKAQIEDFKNQSDTLPITRFLSKDKITSHLAACESAARAAFERSVSHFSLTTDEARLRVTEARNRLAAGIADYHIAKLLLLDSLVNKWNRQALNRCVNEVLSGVVDFTLDTPEKLEEAVRKAKMAYFGEACGETTKQAETWETFERKADTLYDNIRRAQAVFKLKGISYESTTSELESKVIHGISRPFADLANLLGMSWISSGSEFQHELRPEGKSRSYLLKNLSKPKGYGNKHCTSLRFDNWRAEFSDFVFDEPIVQELSPFTVKTITVPAQDENTQVNIAIKETKTETITHSNAVMFTAQNEYAATKGIEEVIGAKIKEAFHASDAFADVKRNEVTLDIDFNHPVICPANRATTVTCSGYTQLTSITYTAKMKLVPEVTFTGGYTRAITKKNDTGNFLKGDKRKKRSYADIPNGPADEIKDKAASNADPWDWPQAIEKYPHIQTLVDRISEPQCYEMYVRGKWEGISGWNFVIQTDIKTATPPGTPI

SEQ ID NO: 21616 - protein, 150 aa, Hypocrea jecorina
MRLASFVAVAIAAAQSAVGLGINCHGDTRCGIAYLSGGRLSHLGTVIKKIDDTRKYENGEDIACIEIDSLNFKGPFKSTLCAWIENYDDTVSGAAIKAAFQELLDHGCGICGAVPLLYAKGVDDVNKGELNVDLVDSLPDGCKANEPCSA

SEQ ID NO: 21617 - protein, 102 aa, Hypocrea jecorina
MQFLAVAALLFTTALAAPSSDVNGIIRRANAFCPEGLLYTNPLCCDLDVLGVADVDCVVPPAKPSSCKSFGSVCASIGRKPRCCAVPVAGVALLCTDPIPAI

SEQ ID NO: 21618 - protein, 471 aa, Hypocrea jecorina; identical to SEQ ID NO: 21476

SEQ ID NO: 21619 - protein, 278 aa, Hypocrea jecorina
MKSAVLLAAGALLVSAVPLEKRVMETDWVTDIVTVTVTVDPNASPSATPTAGGPSPPPAPASSSKPAPSLQPVVAKPSPAPSSKPAPSPKPAPSSAAPAPAPAPSSGGSDYGSIMVDQHNVHRANHSSPALEWDDTLAGYAQITAQGCVFAHDMSEGGGGYGQNLASWGSTGDIDDKQLEAARRGVTDQWYNDEMENWTFYGLANPPSGTNLDSWGHYTQLIWKSSTKVGCYTAKCPAGTVLSMQSWYTVCNYSPPGNFGGRYAENVLKPLGQPTVRI

SEQ ID NO: 21620 - protein, 86 aa, Hypocrea jecorina; identical to SEQ ID NO: 21478

SEQ ID NO: 21621 - protein, 302 aa, Hypocrea jecorina; identical to SEQ ID NO: 21459

SEQ ID NO: 21622 - protein, 405 aa, Hypocrea jecorina
MLLGGCLVLVAVVANVAAVNLLQPPTKVIKRASTCTPVAGRSSATDDTLAIQSAIASCSSGTIVIPASTTYHINTALSFKGCSGCTLQIEGTLQAISDTNYWEGLRAIFLMDGINGANIYSNTGKGVIDGNGQAAWDVFAANSSYRRPTLFYINNSKNVNVRNLYFKSAPNVFHSVTGGSSNVTYTDITLYAVSNSSNVAHNTDGWDIGQSTYVSINHATVTNDDDCVAFKPGSSFATVTNITCTGSHGISVGSLGSGAGNTDTVQNCFVSGATMIDSTKAAGLKLYPGPPKHGTAIVTNVTFENFVLKNTDYAFQVQSCYGEDASYCSSSPSTAQVKGVVVRNFSGTTSSHYSPNVANLNCPAAGSCGLTLSNITVKPPSGSAVFQCANTPSSIGVPCSAGASG

SEQ ID NO: 21623 - protein, 264 aa, Hypocrea jecorina
MFFGKALFAAASVASVVNALGINCQGSGLCTGNKGALGNLLGQVKALDQSKTFSDGEQIACVESSVSIGNPSLCLFYQKTGRTFTVAQTVWYVQALIDHGCQACGSIPVDDGNNVDNGELTANMVAKFRRRDTGMVKVVRKAEGQTENVSKLSKRLGINCRGSSTCGVGGVANLPAGHIDDLKDVIAGQGDGVWGNGQQIGCVAHVTGRLCAFYQNVGDRTFTTQQTLMYLDWLTDHGCTVCGSVPTDDGNNVDNGELTVNYVA

SEQ ID NO: 21624 - protein, 242 aa, Hypocrea jecorina; identical to SEQ ID NO: 21470

SEQ ID NO: 21625 - protein, 96 aa, Hypocrea jecorina
MKSFATVALFIAGILAAPQPNMKLPRSPVCSGLTSTPQCCATDVLGVADLDCQTPSSPVPDAQTFEAVCAAGGQRARCCAIPVAGQDLLCQTPAGI

SEQ ID NO: 21626 - protein, 514 aa, Hypocrea jecorina
MYRKLAVISAFLATARAQSACTLQSETHPPLTWQKCSSGGTCTQQTGSVVIDANWRWTHATNSSTNCYDGNTWSSTLCPDNETCAKNCCLDGAAYASTYGVTTSGNSLSIGFVTQSAQKNVGARLYLMASDTTYQEFTLLGNEFSFDVDVSQLPCGLNGALYFVSMDADGGVSKYPTNTAGAKYGTGYCDSQCPRDLKFINGQANVEGWEPSSNNANTGIGGHGSCCSEMDIWEANSISEALTPHPCTTVGQEICEGDGCGGTYSDNRYGGTCDPDGCDWNPYRLGNTSFYGPGSSFTLDTTKKLTVVTQFETSGAINRYYVQNGVTFQQPNAELGSYSGNELNDDYCTAEEAEFGGSSFSDKGGLTQFKKATSGGMVLVMSLWDDYYANMLWLDSTYPTNETSSTPGAVRGSCSTSSGVPAQVESQSPNAKVTFSNIKFGPIGSTGNPSGGNPPGGNPPGTTTTRRPATTTGSSPGPTQSHYGQCGGIGYSGPTVCASGTTCQVLNPYYSQCL

SEQ ID NO: 21627 - protein, 401 aa, Hypocrea jecorina
MTILSRLAVGVALLAFPELIDAHRVPVKRPNLQWGPKSPGHAFPHSPKRHKTCYVPSCGSNDAPEILKAFKRCNRGGTVVLNEEYVIASPLDLTFLESVDVAITGTIKFTNDIDFWVVNSFKYDFQNSSAFWRFGGKDVNIYGGGHGLIDGNGQAWIEDAKFARCRYLFAYSSGIVANVVQWFNLIANSSDILVSDIDIAVKSESKNPAKNGDGWDTFRSDSVVIQDSYVNNSDDCVSFKPNSTNIIVQGMQCNGSHGISVGSLGQYPAEYDIVEHVYVYNISMSNASDGARIKVWPGTDTPFEPGLSGGGGAGYVKNVTYDTFHNNNNDWAIEINQCYGQSNQTICDKYPSNMTISDVVFKNMWGTTSKKYDPKVGTLTCSSTESSLEKREYRGEEHLGG

SEQ ID NO: 21628 - protein, 437 aa, Trichoderma longibrachiatum
MMMLSKSLVAAATAASALAAVLQTVPRASSFVTISGTQFDIDGKVGYFAGTNCYWCSFLTNQADVDSTFSHIASSGLKVVRVWGFNDVNTQPSPGQIWFQKLSATGSTINTGVDGLQTLDYVVKSAEQHNLKLVIPFVNNWNDYGGINAYVNAFGGNATTWFTNSAAQTQYRKYIQAVVSRYANSTAIFAWELANEPRCNGCSTDVIVQWATSVSQYVKSLDANHLVTLGDEGLGLSTGDSSYPYTYGEGTDFAKNVQIKSLDFGTFHLYPDSWGTNYTWGNGWIQTHAAACLAAGKPCLFEEYGAQQNPCANEAPWQTTSLTTRGMGGDLFWQWGDTFANGAQSNSDPYTVWYNSSNWQCLVKNHVDAINGGTTTPPPVSSTTTTSSRTSSTPPPPGGSCTQLYGQCGGYGYTGPTCCAQGTCTYLNYWYSQCLSA

SEQ ID NO: 21629 - protein, 461 aa, Trichoderma longibrachiatum
MAPSVTLPLTTAMLALVRLVAAQQPGTSTPEVHPKLTTYKCTTSGGCVAQDTSVVLDWNYRWMHDANYNSCTVNGGVNTTLCPDEATCGKNCFIEGVDYAASGVTASGSTLTLNQYMPSSSGGYSSVSPRLYLLGPDGEYVMLKLNGQELSLDVDLSALPCGENGSLYLSQMDENGGANQYNTAGANYGSGYCDAQCPVQTWRNGTLNTSGQGFCCNEMDILEGNSRANALTPHSCTATACDSAGCGFNPYGSGYPNYFGPGDTVDTSKPFTIITQFNTDNGSPSGNLVSITRKYRQNGVDIPSAKPGGDTISSCPSASAYGGLATMGKALSSGMVLIFSIWNDNSQYMNWLDSGSAGPCSSTEGNPSNILANNPGTHVVYSNIRWGDIGSTTNSTGGNPPPPPASSTTFSTTRRSSTTSSSPSCTQTHWGQCGGIGYTGCKTCTSGTTCQYGNDYYSQCL

SEQ ID NO: 21630 - protein, 470 aa, Trichoderma longibrachiatum
MIVGILTTLATLATLAASVPLEERQACSSVWGQCGGQNWSGPTCCASGSTCVYSNDYYSQCLPGAASSSSSTRASSTTARASSTTSRSSATPPPGSSTTRVPPVGSGTATYSGNPFVGVTPWANAYYASEVSSLAIPSLTGAMATAAAAVAKVPSFMWLDTFDKTPLMEQTLADIRTANKNGGNYAGQFVVYDLPDRDCAALASNGEYSIADGGVDKYKNYIDTIRQIVVEYSDIRTLLVIEPDSLANLVTNLGTPKCANAQSAYLECINYAVTQLNLPNVAMYLDAGHAGWLGWPANQDPAAQLFANVYKNASSPRALRGLATNVANYNGWNITSPPSYTQGNAVYNEQLYIHAIGPLLANHGWSNAFFITDQGRSGKQPTGQQQWGDWCNVIGTGFGIRPSANTGDSLLDSFVWIKPGGECDGTSDSSAPRFDSHCALPDALQPAPQAGAWFQAYFVQLLTNANPSFL

SEQ ID NO: 21631 - protein, 462 aa, Trichoderma longibrachiatum
MAPSVTLPLTTAMLAHVRLVAAQQPGTSTPEVHPKLTTYKCTTSGGCVAQDTSVVLDWNYRWMHDANYNSCTVNGGVNTTQCPDEATCGKNCFIEGVDYAASGVTASGSTLTLNQYMPSSSGRYSSVSPRLYLLRPDGEYVMLKLNGEELSLDVDLSALPCGENGSLYLSQMDENGGANQYNTAGANYGSGYCDAQCPVQTWRNGTLNTSGKGFCCNEMDILEGNPRANALTPHSCTATACDSAGCGFNPYGSGYPNYFAAGDTVDTSKPFTIITQFNTDNGSPSGNLVSITRKYRQNGVDIPSAKPGGDTISSCPSASAYGGLATMGKALSSGMVLIFSIWNDNSQYMNWLDSGSAGPCSSTEGNPSNILANNPGTHVVYSNIRWGDIGSTTNSTGGNPPPPPASSTTFSTTRRSSTTSSSPSCTQTHYAQCGGIGYTGCQTCTSGTTCQYGNDYYSQCLL

SEQ ID NO: 21632 - protein, 461 aa, Trichoderma longibrachiatum
MAPSATLPLTTAMLALVRLVAAQQPGTSTPEVHPKLTTYKCTTSGGCVAQDTSVVLDWNYRWMHDANYNSCTVNGGVNTTLCPDEAACGKNCFIEGVDYAASGVTASGSTLTLNQYMPSSSGGYSSVSPRLYLLGPDGEYVMLKLNGQELSFDVGLSALPCGENGPLYLSQMDENGGANQYNTAGANYGSGYCDAQCPVQTWRNGTLNTSGQGFCCNEMDILEGNSRANALTPHSCTATACDSAGCGFNPYGSGYPNYFGPGDTVDTSKPFTIITQFNTDNGSPSGNLVSITRKYRQNGVDIPNAKPGGDTISSCPSASAYGGLATMGKALSSGMVLIFSIWNDNSQYMNWLDSGSAGPCSSTEGNPSNILANNPGTHVVYSNIRWGDIGSTTNSTGGNPPPPPASSTTFSTTRRSSTTSSSPSCTQTHWGQCGGIGYTGCKTCTSGTTCQYGNGYYSQCL

SEQ ID NO: 21633 - protein, 437 aa, Hypocrea atroviridis
MMLYHALLAGLGLAGLAAAAPAKTKADDQTSGAQNVVYWGGSEGMTPLSEYCKPKTGIDILVLSFLNSWGVSGDIPSGRFGNIGCSIDQNGIPTAECSNLASQIKGCQSAGKKIIVSLGGAGGSYTLTSQSQAEKIGQYLWDAYGKGGNPAVKRPFGDAVVDGWDFDLEHSSDTDPAGRQWYPDLVNQLRTNSDKDKSRKYYITAAPQCVSPDASLDDAIQNSVFDYLFVQFYNNPKQCSLNIPGNASINWDTWNQRTSSSKSNNAKIFVGAPASDRAAPSGGYVGPSHLATLIKSLKSEPYFGGVMLWDAHWSDLNIIADCTYAQQVKSILTTGKTCPNTPDVPDSVAFPNAPTFSAPASPSFPPATSSAVYPPPASTSPASILPDNSSSHVSSSSGTGGGVAQWGQCGGEGYTGSTQCQSPFKCVYGGQYWSSCQ

SEQ ID NO: 21634 - protein, 394 aa, Hypocrea atroviridis
MVQSLVYLGALLAALPSARAGFNASSTQNVAVYWGQNSANQETSQQRLSTYCANAEIDIIPIGFMNGISPVITNFANAGNNCTAFADNKNALNCPQIEQDIITCQQTYGKTILISLGGGSYTQGGFSSTDVATSAAQTVWNMFGPVNSNSNVDRPFGSAVVDGVDFDFESGVNNLETFAAELRSLMDASASSANRKFYLSAAPQCVYPDYADNPALNGSVFFDFIMIQYYNNGCGVSSYVPGASTQWNYNFDVWDNWAHTVSKNPNVRILLGIAANTGAASGYVSGTQLSAVISFTKQYSSFAGIMMWDMSQLYLNSGFLDQVVSDLAASGSTPPPTSSTGGSKPTSTSGSTSPTGGGSVPQWGQCGGQGYTGPTQCQSPYTCVATSTWWASCQ

SEQ ID NO: 21635 - protein, 846 aa, Hypocrea atroviridis
MILQSLVLLLLTAIAPVFAETGIDAWLRYAPLSSSVTRGHLNSFPNHIVALNATKDGPLSSAASELQKGIKGILGLNLGVSSSQKSCSAQKTIVVSTLDSYKSACGKLPPKLDLIQDGYWLSTKGESVQIIGQNERGALYGAFQYLSLLGQGNFSQVAFASNPSAPIRWSNQWDNLNAGTAAHGSIERGYGGVSIFFENGYVKKDLSRVPLYGRLLASVGLNGIVINNVNADATLLNETNLEGVKRIADLFRPWGVQVGISLNFASPQVLGELDTFDPLDETVIKWWTDKSNRIYELVPDFAGYLVKANSEGQPGPLTYNRTLSQGANLFAKAIEPHGGIVVFRAFVYDQLNETDWKADRANAAVEFFKDLDGQFDSNVLVQIKFGPIDFQVREPPSPLFVNIPKTPVSIELEVTQEYLGQQCHLVYLPPLWQTILGFDMRANGRQSYIRDIVTGKTFNHKLSGYAGVINIGMNDTWIGSHLAMSNMFAFGRLAWNPQADSQDIVEEWTRLTFGLNRDVVSAIVSMSMKSWPAYEDYSGNLGIQTLTDILYTHYGANPASQDNNGWGQWTRADSKTIGMDRTVSNGTGNAGQYAKDVAHMFEYTQTTPDDLMLWFHHVPYTFKLHSGKTVIQHFYDAHYAGSATAQTFPTTWKSLEGQIDAERYKEVLYRLTYQAGHSLVWRDAISEFYRNLSSIPDQLNRVRNHPHRIEAEAMDLSDFTIVDVDPTECASKYKAIATNGTGTATTKLNVPSGKYNVAVNYYDVMGGIANYEVLLNGKSVGTWKGDSENYLGHDYSSFLDCHSAIRITFEGVKIKKGDTLTIKGTGNALEQAAIDYVSILPQGVVD

SEQ ID NO: 21636 - protein, 418 aa, Hypocrea atroviridis
MNKPMGPLLLAATLMASGAIAQTQTVWGQCGGQGYSGPTNCASGSACSTLNPYYAQCIPGATSFTTSTTSTKSPGSGSSTTSSASQPTGSGQTRFAGINIAGFDFGCTTDGTCVTSQIYPPLKNFGGTNNHPDGVGQMQHFVNDDKLNIFRLPVGWQYLVNNNLGGTLDSTAISNYDQLVQGCLATGAYCIVDIHNYARWNGAIIGQGGPTNAQFVSLWTQLATKYASQSKIWFGIMNEPHDVDINTWGTTVQAVVTAIRNAGATTQFISLPGTDYQSAGNFLTDGSSTALSQVKNPDGSTTNLIFDLHKYLDSDNSGTHTECVTNNIATAFQPVATWLRQNKRQGILTETGGGNTQSCIQDVCQQNQFLNQNSDVFLGYVGWGAGSFDSTYQLTLTPTQNGNTWTDTALAAACFSRA

SEQ ID NO: 21637 - protein, 392 aa, Hypocrea atroviridis
MPSLYLTSALGLLSLLPAAQAGWNPNSKDNVVVYWGQNSGSIGQNRLSYYCENAPDIDVINLSFLVGITDLNLNFANVGNNCTSFAQDPNLLDCPQVAADIVECQQTYGKTIMMSLFGSTYTESGFSSSSAAVSAAQEIWAMFGPVQSGNSTPRPFGNAVVDGFDFDLEDPIENNMEPFAAELRTLTTAATSKTFYMSAAPQCVYPDASDESFLQGEVAFDWMNIQFYNNGCGVSGYPSQFNYATWDNWAKTVSANKNVKLLVGTPASVHAVNFAQYFPTNDQLAGAISTSKAYDTFAGVMLWDMAQLFGNPGYLDLIVADLGGASTPPPASTTLATVTRSSTASSGATPPPSGGGSVPQWGQCGGEGYTGPTQCQSPYTCVVSSQWWASCQ

SEQ ID NO: 21638 - protein, 422 aa, Hypocrea atroviridis
MINNKAALLFAAYAGVSGVAAQQQTTWGQCGGQGYSGPTSCVSGAACSTINPYYAQCIPATGIITSTTTRATSATSTLKSTTASASSTPPPSNGSGTQFAGINIAGFDFSCSTDGTCNVSGAYPPLKNYDGANNYPDGVGQMQHFVKDDGFNIFRLPVGWQYLVNATLGATLNPTNLGYYDQLVQGCLDTGAYCIIDIHNYARWNTGIIGQGGPTNAQFVNLWTQIATKYASEPKIWFGVMNEPHDVNITTWAATVQLVVTAIRNAGATSQYISLPGTDWQSAGSIITDGGVAALGAITNPDGSKTNLIFDVHKYLDSDNSGTNSVCVTDNIDSAFAPLATWLRSNNRKAILTETGGGNTPSCEQYLCQQIQYLNQNADVYMGYVGWAAGSFDPGYPLAETPVQNADGSWTDQPLVSLCLAR

SEQ ID NO: 21639 - protein, 797 aa, Hypocrea atroviridis
MLVNETGLDGWLRYAALPDEFASLRPQYSAIISLTDSQSSPIFTAARELQLGLSKILSQNISLETKDGYCLVCKNGRAAEIIGQNDRGALYGAFEFLRLLSQNQPLPEMRISNPSAPIRWVNQWDNLDGTIERGYAGPSIFFADGHVLDDLTRVQQYARLLASVGLNGLIVNNVNSNYNLLNPFNMQGLARIADIMRPWGVRIGISLYFDTPKELGGLQTSDPLDRNVIAWWEDITSELYRHVPDMLGYLIKANSEGQPGPLTYGRTLADGANMFARALQPHGDGVVMYRAFVYNHHLDESNWKNDRANAAVEYFDGLDTQFEDNVIIQIKYGPIDFQIREPPSPLLAHLRKTPIILELQVTQEYLGQQDHIVYLPPLWKTIFDFDLHVDGQKSLVRDVVSGQRFNWSRSGYAAVVNVGNDPTWLGSHLAMANLYAYGLCAWDPQQSEVDIIQGWAQLTFGLNKAVVDTITNISMASWPTYENYSGNLGIQTLCDIVTHCHYGPSPAAQDGNGWGQWTRADARSIGMDRTVATGTGNSGQYPQKVADRFECIDTTPDELLLWFHHVPYTHRLKSGKTVIQHFYDAHYAGALVAQTFAQQWEILRGLIDDNRFDHMAFRLQYQAGHALVWRDSVNNFYYAKCGIRDELNRVGNHAWRIEAEEMTLEGYKVVPVTPFEAASGGKAIATIPGADVGTATCTVAFPSGTYNIAINYYDHLGGRSQYEVFVNERLIGAWAGDLQDKLSHDFSDRIDGHSATRITFDSVEVKKGDSLKIVGRPDGNELAPIDYVSLLPQGVVD

SEQ ID NO: 21640 - protein, 438 aa, Hypocrea atroviridis
MKFLKSQALALLAATSVLATPLQSVSPRASSYVTVSGLQFNIDGKTGYFAGTNCYWCSFLTNHADIDTTFGHMASSGLKIVRIWGFNDVNQQPGTGNIWFQLLSASGSTINTGSTGLGNLDYVVQSAETNGLKLIINFVNNWNDYGGINAYVNAFGGNATSWYTNTAAQAQYRKYIQAVVSRYTNSTAIFAWELANEPRCNGCATSVVWNWASSVSQYIKSLDSNHLVTLGDEGLGLATGSDGSYPYTYGEGTDFASYMNITTLDFSTLHLYPNSWGEAYDWGSSWIETHAQACVASGKPCMLEEYGATTNHCAIESPWQQTALASKGMAADLLWQWGDTLSNGQSSDDGNTVYYGTSDFTCLVTDHVAAINGGTPPPPASSTTTSKATSTSKPPSGPTGSCSPLYGQCGGTGWSGATCCSSGTCKYSNPYYSQCLSS

SEQ ID NO: 21641 - protein, 408 aa, Hypocrea atroviridis
MLFQKTLAGLGLLASLASAAPSLRRRQDPAGLNVVYWGQNGGGTIENNDLSAYCTATSDIDVLVLSSLWQWSNGATAMGGSFGQSCGVTSSGQPQNCDALVAAITKCKNAGVKIILSIGGAAAYSSFASADEASAAGQYVWNAYGGGSGVTRPFGNNIVDGFDLDLELATGNEYFIPFLNTLRSNFASDPSHTYVITGAPQCPIPEPNMGIIIQGVQFDYLWIQFYNNNNYTVPCSLGINGGAPFNYNNWTSFVETTPSKNAKLFVGVPASPLGANGSPTGSVYYATPQQLAQIVAEVKGNSNFGGIMMWSAGFSDSNVNNGCNYAQEAKNILLTGSPCASGPVTASLPPVPTSTSASSPPGSSSTPPSGSGSVPQWGQCGGDGYTGPTQCVSPYKCVATSEWWSQCE

SEQ ID NO: 21642 - protein, 424 aa, Hypocrea atroviridis
MVMAIKSYVLAALSAASTLAAVVQPAPRASSFVTISGSHFDIDGEVGYFAGTNCYWCPFTYNTAEVDTTLSDIASSGLKVVRVLGFSDWNTLPPTGEIWFQLLNATGSIINTGADGLQNLDYVVASAEQHGLKLIIPLVNNWDDFGGINAYVNAFGGNATSWFTNAAAQSQYRTYIHAVVSRYINSTAIFAWELANEPRCAGCDTGVIAEWATGVSQYIKSLDPNHLVTLGDEGLGLSTGDGSYPYSYASGTDFAANIQIESLDFGTFHLYPDGWGETYPWGSSWVQTHAQACVEAGKICIMEEYGAVTDRCTNMVPWQNASMASLGMGGDLFWQWGETFVSGYGDSYSINYGSSDWHCVVQDHVAAISGKSPPPSTTTLTGPTASGSCSILWGQCGGNGYLGATCCAQGTCTYLNDWYSQCQP

SEQ ID NO: 21643 - protein, 416 aa, Hypocrea atroviridis
MRSAAFLASLGLAGLVVGAPPAPHSVRARQASGAQNVVYWGGTNNESDDLSTYCAPNAGIDILVLSFLDIYGSTGSIPAGNIGNTCYVGTNGAPQLCDGLAASIASCQAAGIKIILSLGGAAGSYSLQSQSQAVSIGQYLWEAYGNSGSTSVQRPFGNVFVNGFDFDLELNLGNQYYQYLISTLRSNFASDPSHTYYITGAPQCPLPEPNMGEVISNSQFDYLWIQFYNNNGYGPDPCSLGLPGDAPFNYNNWTSFIATTPSKNAKLFVGVPANTLAANGNSGGAVYYASPSQLASIIADVKSSPDFGGIMMWDAGYSDANVNNGCNYAQEAKNILLTGAPCGGSSPPASSSAPTSTAKTTKPASSSTSSASGTGPTGSGTVPQWGQCGGEGYTGPTQCVSPYKCVVSSEWWSSCQ

SEQ ID NO: 21644 - protein, 89 aa, Hypocrea atroviridis; identical to SEQ ID NO: 21486

SEQ ID NO: 21645 - protein, 380 aa, Hypocrea atroviridis
MTKASLLIGAFAASACVQAFVVPSAPEVTQGPKLEDRATTCTFSGSNGASSASKSQKSCATIVLSNVAVPSGVTLDLSDLNDGTTVIFQGTTTWGYKEWSGPLLQIEGNDITIQGASGAVLNPDGARWWDGQGSNGGKTKPKFFAAHDLTSSTITNLYIENTPVQAVSVNGVNGLNINGMTIDNSAGDSGGGHNTDGFDIGSSSNVVISGAKVYNQDDCVAVNSGTNITFTGGLCSGGHGLSIGSVGGRDDNTVQTVTFSNSQVTKSANGIRIKASAGDTGTIKGVTYSGITLSSITGYGILIEQNYDGGDLHGSPTSGIPITNLVLQNISGSGGVQSSATNVAIVCGSGACSSWTWSNVVVTGGKKYSSCQNVPSPASC

SEQ ID NO: 21646 - protein, 284 aa, Hypocrea atroviridis
MVAFSRLVAGLSAVTASLAAPAEVVEKSVEERGPHNFFLGPDHPLARRTAINYNQDYTTGGTVNFSPSKTGFNLNWNTQQDFVVGVGWQPGTNLPINYSGTFNVSSGLGSLSVYGWTTNPLVEYYVMETNIGISTGGSQKGTLTSDGGTYAIWENQRVNEPSIIGTATFNQYISIRQSARSSGTVTIQNHFDAWAKAGLNLGTMNFQVIAVESWSGSGSASQQVSNGGTGTGTPTSSSGSTGPTGPSGSCSALYGQCGGIGWNGPTCCSSGSCKVSNSYYSQCL

SEQ ID NO: 21647 - protein, 100 aa, Hypocrea atroviridis
MQFTTFVALFASLAVAAPASEVVERDGINGPCSAGVTNNIPQCCGAGVLDLLYLDCETPRTVSSALNPLRNICATVGLQAKCCTLGIAGLGVLCQDALPL

SEQ ID NO: 21648 - protein, 135 aa, Hypocrea atroviridis
MHFINILLSLASAASAASAAPVASASGSNCRDSGVCAGINANLSSVIAQLKGMDQHQRFSDGEHITCVDANSEGGSSLCLSYQGTGRSWTVFQTAWFAQSLIEKGCQACGSLSLGSDRKHGELTSSVITTPAGGL

SEQ ID NO: 21649 - protein, 839 aa, Hypocrea atroviridis
MKYASALALLLGAAIPVQAAFTWKNVKFGGGGGFIPGIIFHPKTKGVAYARADIGGLYRLNSDDSWTAITDGIATDAGWHNWGIDAVALDPQNDEKIYAAVGMYTNSWDPNNGAIIRSSDRGATWTFSNLTFKVGGNMPGRGNGERLAVDPANSNIIYFGARSGNGLWKSTDGGVTFSKVASFTDTGPFVPDPSDTTGYNSDKQGLLWVTFDSTSGTTGGATSRIFVGTADNITASVYVSTNAGSTWSAVPGQPGRYFPHKAKLQPAEKALYLTYSDGTGPYDGTSGSVWRYDITAGTWKDITPVSGSDLYFGFGGLGLDLQKPGTLVVASLNSWWPDAQLFRSTDSGTTWSPLWAWASYPDMTYYYSISTPLAPWIKNDFIDVTSETPPGSLIKRLGWMIESLEIDPLDSNHWLYGTGMTIFGGHDLTKWDTIHNVTIQSLADGIEETSVQGLASAPGGSELLAAVGDDNGYTFTSANSLGTSPQNVWSTPTWATSSSVDFAGNSVKNVVRVGNTAGTQQVAISSDGGVTWNIDYGADTNMNGGTVAYSANADTILWSTGSTGVQRSQYQGSFTSVSSLPATAVIAADKKTNSLFYAGYASTFYVSNNTGSSFTAGPKLGSTTSVRDIIAHPTTAGTLYVSTDAGIFRSTDSGTTFTQVSTALTNTYQIALGLGSGSNWNLYAFGTGSAGNRLYASADNGATWTDIQGSAQGFGAIDGAKLAGSGSVAGQVYVGTNGRGVFYAQGTVSGGTGGSSSSSTKASSTTIARSSTTLTSSNVSTTRTSTVTSSTRTTSSSSPTGSGLAQHYAQCGGVGWTGPTQCVSPYTCQAQNDYYSQCV

SEQ ID NO: 21650 - protein, 348 aa, Hypocrea atroviridis
MAMLGMPSMVFAASLTQVSNWGNPVNGVSMYIYVPDRVATKPPVIVAIHPCGGSAQEYFSLTRLPSYADSFGFILIYPQTTKDQNCWDCYSSASNTHNGGSDSKAIAAMVSYTLGKYNGDASKVFSVGSSSGAMMTPILMAAYPDVFAGGAGFSGVPAGCFENATSSTPSTPDQSCPHAQKGFTAQQWGDIARAEYPGYTGQYPKMQVWEGTADTLVTIGNLQAQLDQWSNVMGLSFSHNETNTPQSGYTKIVYGDGTRLVGYSAAGVGHFVPFHETDVLDFFDLLGGTSTSSSTQPSGPTSTTGGGGGPSCTAAHWAQCGGMGYSGCTVCASPYSCQVSNAYYSQCL

SEQ ID NO: 21651 - protein, 1322 aa, Hypocrea atroviridis
MVMRVRSLSQRMPSWTKSAKRLSRTNTTFSTTSTERMDSSMDFTETPEDEKSFQLVAGGTSDQLRWLEIDNGPKKPEDAASELAPSEDPSSEEAQSEGVSHEAADEAVAGENAASDNATSVNAPSVKEAASVKAVSTKAVSTKAPSTKAASQKLTLDDATDVDSDEPESYVLQCHDDVNNHLRQINEALSLISIMGPTRSGKSTLLNLLAGCTTEPLFSTSPGAESWTRGTNLGNKIMGVKEFSRLDDGVELPLVGSQRVAFLDTEGHGDQGDLYDIILFTPALLCSRVIVFNTTDVAKDTILTSLAMMTLAAEKLHFGGDKKTSGPKFGQLVIIINKYDLGGSVDDVRKNILRKEIGRTEAIKRRNKIREKLSAEFEDVTVHLLRGNSLKDGVQAKINDKSKEFLVLDDFNDNYVKDFKNLRASLSQMLRVPRLVAGAPLTGASTADFVSSIVKSINRLEQNGQLHVPDIWRAAENEAVNRSHIKFHHDYREACNKLSQDTRLLSTKDCNKKLDRAMQKCLNSVRDSLRYLSQQTIKDTCESLAKESEGQRNEVLAANLQKIEAFAEQELTELISSIQDSLNEAASDFKSFSLNLAEKLLDQYHGDLLEAYKKKISSYDEQALSRNYSVTYDRAFFTAAATVKQNLSVAWASWVVELDTARSEAITAALEQQYRESLIGDESIWETTAEEEQSSHLEQYYNTIDTEYLWENASAIKENYTEKVNKTKDLIKSKVTVREQQMEKSIAQELDKRLNAYQRQLDDSLLPKEDVGDFKSITDTTDSREALIAFLKEQPISGRLYDHHLNEFDNQLSTKKSTYGDRYTSVLKDFLAYLEEELDRVVKTQLEDFKNQSDTLAITRTVSKDRITTHLATCETAAKAAFEASVVNFSVTHEDSKTRVVEARNKLASGISDYHIAKLLLLDALVNKWNRQALNRAINEVMAGVVDFTLDTPEKLEEGIRKAKMAYFGEACGELTKQAETWETFEQRSDTLYENVKRAQAVFKTKGISYESTTSELESKVIHGISRPFADLANLLGMSWISSGSEFQHELHPEGSGRSYLLKNLSKPKGFGNKQCTSLRFDNWRAEFSDFVFDEPIIQELSPFTVKTITVPAQDENTQVNISIKETKTETIVHSNHAMFNAQNEYASTTGTEDAIASTIKSAFNGSDAFTDGKRNEITLDIDYNCPVICPAKRATTVTCSGYTQLKSITYTAKMKLVPEVTFTGGFTRWGGKNNENPNFLRGESRKRVYKDINNGPADQLKDKAAQNADPWDWTEAIEQNPQIQTLVDRISDPQCFEMYVRGKWEGISGWKFVIQTDIKTT

SEQ ID NO: 21652 - protein, 106 aa, Hypocrea atroviridis
MQFFAVATLFLATAFAAPSVDSNGNGVAHRQPAPFCPPGLLYTNPQCCDVDVLGVADLNCVVPPRGPSNCKTFSGICASIGKEPKCCAVPILGQALLCTDPVGSRN

SEQ ID NO: 21653 - protein, 472 aa, Hypocrea atroviridis
MAPSGTLPLAAAILALAGIVTAQQPGTSTPEVHPKLTTYQCTTSGGCVAQDTSVVLDWNYRWMHDANYNSCTVNGGVNTTICPDEATCGTNCFIEGVNYTASGVTTSGSSLTMNQYMPATTGGYSSVSPRLYLLGADGNYVLLQLNGKELSFDVDLSALPCGENGSLYLSQMADNGGANQYNTAGANYGSGYCDAQCPVQTWKNGTLNTNHSGYCCNEMDILEGNSEANALTPHSCTATACDSSGCGLNPYASGFHSYYGPGLTVDTSKPFTITTQFNTDNGSPSGNLVSITRKYIQNGVSIPSAQSGGDIISSCPSASAYGGLTTMGKALTSGMVLIFSIWNDSGGYMNWLDSGSSGPCSSTEGNPSTILANNPGTHVTFSNIKWGDIGSTTSGGSSPPPPPASSTTLRTSTTTSKTSTAPPSCTQTHWGQCGGNGYTGCKTCASGTTCQYSNDCEYSMNISKRRFRILIM

SEQ ID NO: 21654 - protein, 296 aa, Hypocrea atroviridis
MPSMKSSLALLLAQALLATNQANGAIVKRQCPGIHVFGARETTVSAGYGSSATVVNLIIAAHPGTTSEALNYPACGGQASCGGVQYNASVVAGINAAVTAIDNFHTSCPDTQLVLVGYSQGGQVYDDVVCGGGDPGEGYSNTAVPISASAAAAIKAVILMGDPRNIAGLPYNVGTCKAGGFDAHNAGFQCAAASKVQSYCDAADPYCCNGNDPNTHQGYGTEYGSQALAFVNSKLSGGGGSGPTSTPPSGPTSTGSSPTATQTHYGQCGGIGYSGPTQCGGGYTCQVLNSYYSQCL

SEQ ID NO: 21655 - protein, 382 aa, Hypocrea atroviridis
MNKCGRKLWAGLALLALPAIASASCALPSTYKWTSTGPLANPKSGWVSLKDFSQVPYNGQHLVYSSTVNAAGSYGSMNFGLVSNWTSLSTASQNTMNLGTVAPTLFYFSPKKIWVLAYEWAATPFAYVTSSDPTNANGWSSSQPLFSGSISPSSPIDPALISDGTNMYLFFAGDNGSIYRSSMPIDQFPSSFGTSYTTVMSAATNDLFEAIQVYTVSGQNQYLMIVECIGSVGRYFRSFTATSLSGTWTPQAATESNPFAGHANSGTTWTNDISSGDLIRSTNDETMTIDPCNLQLLYQGMAVGSSGDYNSLPWRPAVLTLANPGSSTGNGTGSGGSGGSGSGEASQYAQCGGLGYAGPTVCQARQSPYKCTYVNEYYSQCI

SEQ ID NO: 21656 - protein, 344 aa, Hypocrea atroviridis
MKSAFLLATGAILAAAMPLDKRALETQWVTDIVTVTVTVDPSAPSSAGGVFIQAVSSQPAATPSPQVQAPAPKPVYAAPPPAVSSPKPAPPPPPPSPAPAAPQISTVIVVETPKSSPAPAPSPEVAVKSSPKPSPKPSPSPVAAAPKPAASSPAASSSSSSSSSSSSSSSGSNDYQSAMLNEHNIHRANHSAPALEWDDQLAGFAQITASGCVFAHDMTEGGGSVSYGQNLASFGSSGDISGDQILSGRRGVTDQWYNDEMENWTFYGQSNPPSGLDLDAFGHFTQVVWKGSTKVGCATVQCPSGSVLSLPSWYTVCNYGPPGNFGGEYGDNVLEPLGQAPVTV

SEQ ID NO: 21657 - protein, 97 aa, Hypocrea atroviridis
MQFFAVATLFVVGVLAAPSPSGLNSRDTLCAAGLYSTPQCCAVDVLGVADLNCAGLVGTVTTAAEFKANCAAIGQEARCCVLPVLGQDVLCQTPPGL

SEQ ID NO: 21658 - protein, 217 aa, Hypocrea atroviridis
MKHLLVTALLAAGALAMPAGSSCASPSTDYPPPSTDYPPPSTDYPPPSTDYTPPSYPTPTPTPTYTPPPPKNGGGKYPPPPPPPSSPPYSTAPHNGGGGGNGGNGGNGGNGGNNGGGNSGNGGGNNGNGGNNGGGNNGGGNNGQYECSGGGGLYSNLQCCSVDVLGIADLDCKPPSKTPVSGSDFKSICQASGAKPKCCVLPILGQGLLCEDAIGTA

SEQ ID NO: 21659 - protein, 98 aa, Hypocrea atroviridis
MKFFVATALFATAAIAGPVEVRTGTAPLCPNGLYSNPQCCDTLVLGIVGLGCEVPTQTPRDGVDFKNICAKTGDQAVCCVVPVAGQDLLCQTAVGIQG

SEQ ID NO: 21660 - protein, 638 aa, Hypocrea atroviridis
MKSAILLGLTGLAAHVNAHPTKQPENGNSLAKRGVDISKYHLPSLSQYTPSPNIEEEASLQALAYKRNYVDTATRAVKKVAPKAEFRVVDDHYIDVDGIGHVHFKQTVHGIDIDNADFKVNIGKDGRVFSHGNSFFSGKLPQESPLGKRDFSDPTNALKGAIDILGLPVQADGATAQAEEGTEKYTLKGTSGAVSDPKAHLVYLVKGDGTLALTWRVETDIMDNWLLTYVDATTNEEIHGVVDYVSDFATFQVYPWGLNDPTEGDRKVLTDPWRTDASPFTWVGDGTTNYTVTRGNNAIAQDNPSGGDSYLNNHRPSSSTRDFQYPFTLTQTNPTDYRDAAITQLFYTVNKYHDLLYVLGFNEVAGNFQTNNNGKGGKGNDLVIVNAQDGSGTNNANFATPVDGSSGRMRMYIWTTANPKRDGDLEAGIVIHEYTHGLSTRLTGGPANSGCLNGVEAGGMGEGWGDFYATAIRLKAGDTRNTDYPMGVWADNNVKGIRQYPYSTSLTTNPLTYKSVNAQNEVHAAGTTWATILYEVLWNLIDKYGKNDADFPTFDSQGVPTDGKYLALKLVLNGLALQPCTPTFVSARDAILDADRALTGGENLCELWTGFAKRGLGSGAKYASTSRTESYTIPSGVC

SEQ ID NO: 21661 - protein, 88 aa, Hypocrea atroviridis
MQFSIVAIFATGAFAAICPTGLYSNPLCCGSGILGVVFLDCEAPKAQVSDSMSFQNACAAVGLQPLCCAAPTVSIPKSISDISLGGLC

SEQ ID NO: 21662 - protein, 219 aa, Hypocrea atroviridis
MRLLFLLHTLILFARPSSSTAIVTVTAAPAIPSNEPSYSIASSFTSAILNSTNTYRRQYNASSLSWNTTLEKFATSYLQSDTTCRFAHSGGPYGENLAIGYPNATASVEAWGNEEAKYNFNDPGFSEETGHFTQLVWKTTTTVGCGRRLCGTKGWFVVCEYWPRGNVGGEYAKEVDRNIDGGGGTRLSSPIVAAIAVVVSLVQCCVIIVVVWWFGTAKL

SEQ ID NO: 21663 - protein, 360 aa, Hypocrea atroviridis
MPSFGFFLAMLVATAAAKPVSIDPRASCTFTDAATAIKQKTSCSTITLNGVAVPAGQTLDLTGLKDNTNVIFAGKTTFGYKEWDGPLISISGKGIQVQGASGHTIDCAGQRWWDGKGSNGGKTKPKFFSAHKLTNSNIKSLNVLNTPVQAFSINSVTDLGLYNINMDNSLGDTEGGHNTDAFDVGSSTGVYISGAIVKNQDDCLAINSGTNITFTGGNCSGGHGLSIGSVGGRSDNTVKTVRILDSKISNSQNGVRIKTVSGATGSVSDIVYDNISLSNIGSYGIVIEQDYKNGGPTGTPTAGVPITGLTVNKVVGTVQKSGINAYILCAACSNWTWTNNAVTGGTKTKTNKGIPKGVSI

SEQ ID NO: 21664 - protein, 86 aa, Hypocrea atroviridis
MQFSIVALFATGALAAVCPTGIYSNPLCCVTDVFGVIGQNCEAPKSAIFDGLSFQNACAAVGLDPLCCVAPVADQGILCQIPVGTQ

SEQ ID NO: 21665 - protein, 420 aa, Hypocrea atroviridis
MKFLRHVLQLLPASLVFAAYTPSSPEHTCVIPALNDGRDDAPAIREAFDKCGKNGKVIFQKDTTYSIQTVLQLHDLKNVQVDMLGTLEYSTDVRYWILHGSYYYFQNISIAMEFSGEDITIDGHGSGTIDGQGQVWYDLALGVGGLYGRPIPFCLRNVKNAVARNFKILQSGKWNFVMLESQNILVDNIYLSSTSDDDQANPGNLGNTDGFDTINSDNITIQNSWANVGDDCVSFKPGSTNMHVKNLTCYNSAGIAIGSLGQYEGVRDVVENITAEDVTLIGSRNGAYIKTYVGKRTYWPPQGGGGGNGYVRNVVFKNFHIENITSSPVLIQQCTHWGGYNVPACADTPATGYFSNISWSNFTGYLNEKVGTKSISWACSPLAQCEGFSFKDINVKSVDGADGTYSCSNVDGYDATCQKV

SEQ ID NO: 21666 - protein, 319 aa, Hypocrea atroviridis
MARQAALLALATFSSLSIAQISDGFEDGWNQSTWPTYAPDCNQGGTVSLDTTVAHSGSNSMKVVGGANGYCGHIFFGTTQVPTGDVYVRAWVQLETALNSDHVTFIVMPDTAQSGKHLRIGGQSEILDYNRESDDATLPDLSPQGIASSVDLPTGSFQCFEYYLGTDGTIQTWLNSNLITGMTAGPSANNSNDAGWTRETYVPDITGVYFGWEAYSGDINTVWFDDVAIATSRVGCGGPASSGTTSVRPTSTAHSTTSNPGTTTKPSTTIPPTTSKTTSSAGATQTKYGQCGGQGWSGPTVCASGSTCTYSNPYYSQCL

SEQ ID NO: 21667 - protein, 470 aa, Hypocrea atroviridis
MAGRVFATLATLAALAASAPVVEERQACASVWGQCGGQGWSGATCCASGSSCVVSNPYYSQCLPGSGGGSSSSTLASSTRASSTTVRSSSTTPPPSSSTPPPPVGSGTATYQGNPFSGINPWANSFYAQEVSSSAIPSLSGAMATAAAAAAKVPSFMWLDTLSKTSLLSSTLSDIRAANKAGGNYAGQFVVYDLPDRDCAAAASNGEYSIADNGVANYKNYIDTIVGILKTYSDIRTILVIEPDSLANLVTNLSVAKCSNAQAAYLECINYAITQLNLPNVAMYLDAGHAGWLGWPANQQPAAQLFASVYKNASSPRAVRGLATNVANYNGWNITSAPSYTQGNSVYNEQLYIHAISPLLTQQGWSNTYFITDQGRSGKQPTGQQAWGDWCNVIGTGFGIRPSANTGDSLLDAFTWIKPGGECDGTSNTSATRYDYHCGLSDALQPAPEAGSWFQAYFVQLLTNANPSFL

SEQ ID NO: 21668 - protein, 457 aa, Hypocrea atroviridis
MVHISNFLLAALPAVFALPSASQHDLEGRSANVAQTEAHWANQASAQGRHFCYIKPDANGGDDAPAIMDALNNKCNSKALVIFPGPVYNIQTNMTTLDLQDVVIYQFGRMLWSTDIDYWLSVSMPVGFQNQSTVWYFGGHNVVWDGWGVGTLDGNGQVWYDWAKSQGNLARRPMNINFRTLTNSVIKRLRFVQSQMWTMAITYSQYVDLDDIYVNSTSTSQWSTLNTDGCDTIYSDSITFRRWTISNGDDAIALKMNSSNIAVYDSYFENGQGIAIGSMGQYNGKYEHLENFYARNITLKNTAHVSYLKTWAGISRGYPPNGGGGGLGVARNITIEDVTLIGGRQQPLFAWQCENYSGFSGQDCDSSLFKMEDITWKNIKGTVGPGVTEAVYLQCSSAAGGCDNVEVENFDVVVASTGKPLVVWDCFNVNAPIGFTCTESVTPKLSPAVTGGHGPDN

SEQ ID NO: 21669 - protein, 783 aa, Hypocrea atroviridis
MKLNSVAGLVAATAGVVQATASSDDSLAIFAKRRTADLAQFPDPTWFSKIDSWLSSQKADGTWSDVNYLSGCPAQRANWPIQEHWNRLITLGAAWSGTNPAVSSSQAKDPKLLAAVQKGLNYLFSNDYTSADCMGDGGDATKGCPCGTPGLWNTNWYDQAILIPQLCSTACLLVKDANLTETQRAGCERIPNRAYALRDGTYGTGGKMTGANVVLIMQNSVTLALFTDNSTILADSMTRAMAEMTFTDTPGADGIHRDGTFLQHDGVLYNGNYGKDLLNAFIQLESEAIGTSFAADNDTRAAMSTYVKGDEWLIYTDSQTKTEHWDFNAIGRFVSFPTVDLQASADINFNVSKLAAATADFQGQYAVNDTIRRLLSNGTQKLTGNRGFWASDYMVHRRSNFMLTNKMISTRSANSESVNGANPYAYHMGHGTLYSYVKGNEYKDIMGAWDWNLVPGTTTLLNQPKLQASQVKYYGLKDFVGVVSDGAFGAAVEDYVDPLTQNLSYRKSWFYVDEGVIVITTDIKKNATAGNTPVVTVLDNRAADSTRALVKSGFVGQQGEQHLTTDTLYYANNGYLAYDTPFQLTLSQGKRSGNWSEISTSTQGVETVDIFSAYTTIKGNSFTYGFFPSISSVKLLKELVDPTWIPITKNGISGIYGKGRASLAFWPGGAKSVKLDLRELGWSSKAETLTFTSDQPALYLLSAQKKDKKGLHLTVTLADPTQKLAAASYSIKLSGQRYKVREVDGRSEGLEKRGDGSIGFGVKLPAGGLAGSSISSEVVLELN

SEQ ID NO: 21670 - protein, 628 aa, Hypocrea atroviridis
MPTAVRICVCGDESTGKSSLIASLVKDQFMTNKIQPVLPQISIPPSIGTPENVTTTIVDTSARPQDRTTLRKEIRKCNVILLVYADHYSYERVALFWMPYFRSLGVNVPVVLCANKSDLVGQSSTSQVVEEEMLPVMAEFREIDSCIRTSAREHRNVNEVFFLCQKAVTHPIAPLFDYKEGHLKPACVDALKRIFYLCDKNQDGYLDNQEMRDFQSRCFDKPLTDDELENIKLSLSKALRGADLSKGIDLRSFLQLNKMYAEKGRHETIWIILRKYHHTDSLSLEENFLHPKFEVPEFCSAELSPAGYRFFVDLFLLFDKDNDGGLNDEELEALFAPTPGLPPSWSDSAFPSSTVRNEGGYITLQGWLAQWSMTTFLEPKTTLEYLAYLGFEPPNPKDPITSALKVTKPRKRRRRPGRVERNVFHCYILGASGAGKSSLLDAFLNRTFDGLYHPTIKPRRAVNSVELPGGKQVYLIFEELGELEPAILENQAKLDACDLLCYAYDSSDPDSFSHIVDIRKKHPQLDELPSVYTALKADRDKTMQRSELQPDQYTSSLNMSSPLHVSVTWNSISELFVALAEAAANPSIAFPKSDDDMIDRTSLYLTLGATACAAIAAVMIWRRSTNAL

SEQ ID NO: 21671 - protein, 493 aa, Hypocrea atroviridis
MLRKLSLLALAGLVSHSVQQSCAALYGQCGGSGWSGATCCVSGAQCSALNQYYSQCVPSTGSSGPTGSSSSTTSIPHSQSSSASHSSGGQSSVGQSTGVSTYTTTDTSTVALHSQSPYPSIAASSCGAWTLVDNVCCPSYCATDDTSESCTCSDCTTPPSADCKSGTMYPEVHTVSTNETWHYSRSTHFGLTSGGACGFGLYGLCTKGSVTASWTDPMLGTTCDAFCTAYPLLCKDPAGTTLRGNFAAPNGDYYTQFWPSLPGDLDNYLSCGECIELIQTKPDGTDYAVGEAGYTDPITLEIVDSCPCSANSKWCCGPGADHCGEIDFKYGCPLPADSMHLDLSDIAMGRLQGNGSLTNGVIPTRYRRVQCPKLGNVYIWLRNGGGPYYFALTAVNANGPGSVTKIEVRGAGSSTWIPLVHDPNYTSSRPQERYGSWVIPQGSGPFNLPVAVRLTSPTGEQIVNEQAIKTFTPPSTADPNFYYIDIGVQFSKN

SEQ ID NO: 21672 - protein, 182 aa, Hypocrea atroviridis
MKVLAIATILIAAVSAAPTKELCPSPIPPIPSYGLPSPPLNGEIPPLNGGNPPLNGVIPPVDSVIPPVNVANPPVDDVIPPVNVANPPVDDVIPPVNVATPVSGSNVFGQFECPAGLLYSNPQCCSVDVLGIADLDCSSPSKTPKDASDFQDICDTAGKKAQCCAVPIAGQAVLCQDVIGAY

SEQ ID NO: 21673 - protein, 507 aa, Hypocrea atroviridis
MYQKLAAISALLAAARAQQVCTTQAETHPALSWSKCTSGGSCTTQAGKVVLDANWRWTHAYPSGNNCYNGNTWDATLCPDDATCAKNCCLEGADYSGTYGVTTSGNQLTIDFVTQSANKNVGARLYLMASDTAYEEFTLLNNEFSFDVDVSALPCGLNGALYFVSMDADGGASKYPTNLAGAKYGTGYCDSQCPRDLKFISGQANVEGWQPSSNNANTGIGGHGSCCSEMDIWEANSISQALTPHPCETVGQVTCSGDDCGGTYSNNRYGGTCDPDGCDWNPYRLGNHTFYGPGSGFTVDTTKKITVVTQFSSTGINRYYVQNGVKFVQPNASGLSGYTGNTINSAYCSAEQTAFGGTSFTDKGGLTQMNKALSGGMVLVLSLWDDYAANMLWLDSTYPTNDTASTPGAARGTCSTSSGVPATVEQQSPNSKVVFSNIKFGPIGSTGSNSTTGTPTGGGGGPTSTGSSTGATQTHYGQCGGTGYSGPTQCASGTTCQVLNQYYSQCL

SEQ ID NO: 21674 - protein, 152 aa, Hypocrea atroviridis
MRFNSFIALAAATAQSAAGLGINCEGDSLCGISYLAGGRLTQFQSIFDNIFEKRIWDNGDDIGCVEMTHLNFQGSFKGVYCAYIQNLDGSVDGATLKSLYTELIEYGCGICGSIPIHYAKGDNDVNHGELSFNMVDSLPENCELNQPCKIPN

SEQ ID NO: 21675 - protein, 120 aa, Hypocrea atroviridis
MQFLAVLPLLYTAAAALGINCRGNANCVGTPECRLSDLILQVSQQDPSTSYSPGQHIACCGIPGGNICAFTQGISNSITAGEALGMLQGLSSHGCGQCGSIPFKDNNVAEGQLTVNWTDH

SEQ ID NO: 21676 - protein, 444 aa, Hypocrea atroviridis
MAIFRKLVLWGALLLSVYPIDAHKTILERPKLQWGPKTPGRPFPHSPHRHKTCHVPSSSHSNNHKDIDSAPEIFKAFKQCNRGGRVVLDGTYTIASPLDLTFLEAVDVVLTGTIKFSDNIDYWVQNSFKYAFQNSSAFWRFGGKDVNIYGGGHGLLDGNGQAWYDAFATNPTLLRPILFVLDGLNAGSVTGLKMRNSPDWFNLVANSTDILVSDIDIAVRSESSNPAKNGDGWDTFRSNRVVIQNSHVNNSDDCVSFKPNSTNIIVQGLQCNGSHGISVGSLGQYPAEYDIVENVYVYNISMSNASDGARIKVWPGTDTPFQPGLSGGGGAGYVKNITYDTFYNDNNDWAIEINQCYGQSNQTICDKYPSNVTISDVLFKNMWGTTSSKYDPDVGTLTCSSPEKCVNIAAQNISVANPSGNTPQWICTNMDDGLLDINCVSASS

SEQ ID NO: 21677 - protein, 349 aa, Hypocrea atroviridis
MAQKLSNLFAIALTVATGVVGHGHVNNIVVNGVYYQGYDPTSFPYMPDPPIVVGWTAADTDNGFVSPDAYQTPDIVCHKNGTNAKGHASVKAGDSVLFQWVPVPWPHKSTVVDYLANCNGPCETVDKTTLEFFKIDGIGLLSGGNPGTWGSDVLIGNNNTWVIQIPEDLQTGNYVLRHELIALHSAEQADGAQNYPQCFNLAVTGTGSLQPSGVLATDLYHETDPGILFNIYTSPLTYIIPGPTVVSGLPSSVAQASSAATATSSATVSGGGGGSSTGGSTSKTTTVVRSTTSVTSKASSSTAVTTPPPAGGTQTLYGQCGGSGYSGPTKCASPAVCTTLNPYYAQCLN

SEQ ID NO: 21678 - protein, 139 aa, Hypocrea atroviridis
MLFKLAITIIASTAGVSALGINCEGSAYCSGVLGNPGANDEPLPDMVDIIDYGIDDNRWYAAGEHIACDQPSGVCAFVQKTSGAMGTDIARVVRDLANHGCTVCGSVPLGFPGTNDVNNGEVTFNFVGLDDMGSCSGLC

SEQ ID NO: 21679 - protein, 405 aa, Hypocrea atroviridis
MDKCRALIFAIVAVNGATVTISQPPTQVVKRGSSCTPVAGHSSSIDDAPAIQSAIASCPSGTIVIPKSTTYYINTAFSFVGCSGCTLQIEGTLQATSNTTYWGGRRAIFLMDGINGATVYSATGTGIVDGNGQAAWDLFAANSSYQRPTLFYINNSKNVKLSNLYFKSAPNVFHSVTGGSSNVSYSNISLYAVSSSANVAHNTDGWDIGQSTYVTIDGATVTNDDDCVALKPGCSFATVTNISCTGSHGISVGSLGSGVNSKDTVQNCLISGATMINSAKAAGLKLYPGPPDHGTAVVSNVTFENFILQNTDYAFQVQSCYGEDSSYCETNPSTAQIAGVVVRNFSGTTSTHYSPNIANIDCPAAGTCGLTLSNITVTPPKGSAVIQCANTPSNLGVPCASGASG

SEQ ID NO: 21680 - protein, 247 aa, Hypocrea atroviridis
MKASLFVGSLIASSAAAYKATTTRYYDGQEGACGCGGANGGAAFSWQLGISSGVYTAAGSQALYDTAGASWCGAGCGKCYNLTSTGEPPCTSCGTGGVAGQSIIVMVTNLCPNNGNAQWCPTVGGTNQYGYSYHFDIMAQNEIFGDNVVVDFEPVACPGQATSDWQQCLCVGMQETDTTPVLGGGSSPPPGSSSSRPPASATSSAPTGSGTQSLYGQCGGTGWAGPTACAPPATCKVLNQYYSQCLD

SEQ ID NO: 21681 - protein, 457 aa, Hypocrea atroviridis
MTMQVLKILVLAVPILAQSQVWGQCGGIGWTGPTTCVAGATCVVNNPYYSQCIPNGQASSATTAATTTTFATSTTKTSTPVSGSQTSTSAATCSALPASISLKSNSKLNDLFTLFNGDKVTTKAQFACRQAEISQLVQRYELGTLPGRPATLTASFSGNTLTINCGDSGKSMSFSVTITYPSSGSAPYPAIIAYGGGSLPAPAGVAMINFNNDDMAAQVNTGSRGQGKFYTLYGSGHSAGAMTAWAWGVSRVIDALEQVTAARIDTTRIGVTGCSRNGKGALLAGAFDSRIALTLPQESGAGGSACWRISDYLKSQGANIQTASEIIGEDPWFSTSFNSYVNQVPVLPFDHHSLAALIAPRGLFVIDNNIDWLGPQSCFGCMTAAHTAWQALGASDHMGYSQIGAHAHCAFPSNQQSQLTAFVQKFLLGQSTNTAIFQSDFTFSQSQWIDWTVPTLT

SEQ ID NO: 21682 - protein, 247 aa, Hypocrea atroviridis
MRSAAIFTALLAGQAFAYPKPVIQSTSKRDWPSINAFLTEIAKIMPIGDTVTAACDLIGDGEDIAADLFGISETENEACGDVTVLFARGTCDPGNVGVLVGPFFFESLQNALGSTSLGVQGFNYPASVQGFLSGAVQPGIDLATQITSVTQSCPNTKLVVGGYSQGSLVVHNAVGHLDAATASKISAVVLFGDPRDGQALPNIAASKVLTVCHDGDNICAGGDIILLPHLTYAEDADTAAAFVASLV

SEQ ID NO: 21683 - protein, 89 aa, Hypocrea atroviridis; identical to SEQ ID NO: 21486

SEQ ID NO: 21684 - protein, 86 aa, Hypocrea atroviridis
MQFSIVAIFATGAFAAICPTGLYSNPLCCGSGILGVVFLDCEAPKAQVSDSMSFQNACAAVGLQPLCCAAPTADQGIICQMPAGTI

SEQ ID NO: 21685 - protein, 85 aa, Hypocrea atroviridis
MQFFAVATLFVVGVLAAPSPSGLNSRDTLCAAGLYSTPQCCAVDVLGVADLNCAGPNCAAIGQEARCCVLPVLGQDVLCQTPPGL

SEQ ID NO: 21686 - protein, 86 aa, Hypocrea atroviridis; identical to SEQ ID NO: 21664

SEQ ID NO: 21687 - protein, 98 aa, Hypocrea atroviridis; identical to SEQ ID NO: 21659

SEQ ID NO: 21688 - protein, 106 aa, Hypocrea atroviridis; identical to SEQ ID NO: 21652

SEQ ID NO: 21689 - protein, 89 aa, Hypocrea atroviridis
MKLFIAAALFTLGLAAPVTETKSHNIVARSTYSCPSGLTNSSPMCCSVNVLGLLALDCANVGEDGCHGAAKLNCCTLGLAGQGVICNEQ

SEQ ID NO: 21690 - protein, 217 aa, Hypocrea atroviridis; identical to SEQ ID NO: 21658

SEQ ID NO: 21691 - protein, 182 aa, Hypocrea atroviridis; identical to SEQ ID NO: 21672

SEQ ID NO: 21692 - protein, 100 aa, Hypocrea atroviridis; identical to SEQ ID NO: 21647

SEQ ID NO: 21693 - protein, 396 aa, Trichoderma tomentosum
MPSFSFTAALGLLSLLPAAQAGWNQNSNNNIVVYWGQNSGSVGQNRLSYYCQNAPDVDVINISFMVGITNLNLNLANVGNNCTSFPQAPNLLNCPQVAADIVECQQTYGKTIMMSLFGSTYSESGFSSSSAAVSAAQEIWAMYGPVQSGNSTPRPFGTAVVDGFDFDLEDPIENNMEPFAAELKSLMDSNTSKKFWLSAAPQCPYPDVSDESFLDGQVAFDWVNVQFYNNGCGVSHYPTDFNWATWDNWAKTVSANKNAKVLIGTPANTGGANAGSFPTDSQLSGAISLAKGTSSFGGVMLWDMAQLFTNTGYLAKIVADLGGSASTPPPPASTTLTTVTRSSTAASGPTSSAPPSGGNGGVAQWDQCGGDGYTGPTQCQSPFKCVVESEWWSSCQ

SEQ ID NO: 21694 - protein, 371 aa, Neosartorya fumigata; identical to SEQ ID NO: 158

SEQ ID NO: 21695 - protein, 302 aa, Hypocrea jecorina; identical to SEQ ID NO: 21459

SEQ ID NO: 21696 - protein, 368 aa, Neosartorya fischeri; identical to SEQ ID NO: 163

SEQ ID NO: 21697 - protein, 382 aa, Penicillium purpurogenum; identical to SEQ ID NO: 20792

SEQ ID NO: 21698 - protein, 539 aa, Aspergillus clavatus; identical to SEQ ID NO: 295

SEQ ID NO: 21699 - protein, 532 aa, Neosartorya fumigata; identical to SEQ ID NO: 296

SEQ ID NO: 21700 - protein, 532 aa, Neosartorya fumigata; identical to SEQ ID NO: 296

SEQ ID NO: 21701 - protein, 640 aa, Aspergillus niger
MSFRSLLALSGLVCTGLANVISKRATLDSWLSNEATVARTAILNNIGADGAWVSGADSGIVVASPSTDNPDYFYTWTRDSGLVLKTLVDLFRNGDTSLLSTIENYISAQAIVQGISNPSGDLSSGAGLGEPKFNVDETAYTGSWGRPQRDGPALRATAMIGFGQWLLDNGYTSTATDIVWPLVRNDLSYVAQYWNQTGYDLWEEVNGSSFFTIAVQHRALVEGSAFATAVGSSCSWCDSQAPEILCYLQSFWTGSFILANFDSSRSGKDANTLLGSIHTFDPEAACDDSTFQPCSPRALANHKEVVDSFRSIYTLNDGLSDSEAVAVGRYPEDTYYNGNPWFLCTLAAAEQLYDALYQWDKQGSLEVTDVSLDFFKALYSDAATGTYSSSSSTYSSIVDAVKTFADGFVSIVETHAASNGSMSEQYDKSDGEQLSARDLTWSYAALLTANNRRNSVVPASWGETSASSVPGTCAATSAIGTYSSVTVTSWPSIVATGGTTTTATPTGSGSVTSTSKTTATASKTSTSTSSTSCTTPTAVAVTFDLTATTTYGENIYLVGSISQLGDWETSDGIALSADKYTSSDPLWYVTVTLPAGESFEYKFIRIESDDSVEWESDPNREYTVPQACGTSTATVTDTWR

SEQ ID NO: 21702 - protein, 640 aa, Aspergillus awamori; identical to SEQ ID NO: 21701

SEQ ID NO: 21703 - protein, 612 aa, Aspergillus oryzae
MVSFSSCLRALALGSSVLAVQPVLRQATGLDTWLSTEANFSRQAILNNIGADGQSAQGASPGVVIASPSKSDPDYFYTWTRDSGLVMKTLVDLFRGGDADLLPIIEEFISSQARIQGISNPSGALSSGGLGEPKFNVDETAFTGAWGRPQRDGPALRATAMISFGEWLVENGHTSIATDLVWPVVRNDLSYVAQYWSQSGFDLWEEVQGTSFFTVAVSHRALVEGSSFAKTVGSSCPYCDSQAPQVRCYLQSFWTGSYIQANFGGGRSGKDINTVLGSIHTFDPQATCDDATFQPCSARALANHKVVTDSFRSIYAINSGRAENQAVAVGRYPEDSYYNGNPWFLTTLAAAEQLYDALYQWDKIGSLAITDVSLPFFKALYSSAATGTYASSTTVYKDIVSAVKAYADGYVQIVQTYAASTGSMAEQYTKTDGSQTSARDLTWSYAALLTANNRRNAVVPAPWGETAATSIPSACSTTSASGTYSSVVITSWPTISGYPGAPDSPCQVPTTVSVTFAVKATTVYGESIKIVGSISQLGSWNPSSATALNADSYTTDNPLWTGTINLPAGQSFEYKFIRVQNGAVTWESDPNRKYTVPSTCGVKSAVQSDVWR

SEQ ID NO: 21704 - protein, 639 aa, Aspergillus kawachii
MSFRSLLALSGLVCSGLANVISKRATLDSWLSNEATVARTAILNNIGADGAWVSGADSGIVVASPSTDNPDYFYTWTRDSGLVIKTLVDLFRNGDTDLLSTIEHYISSQAIIQGVSNPSGDLSSGGLGEPKFNVDETAYTGSWGRPQRDGPALRATAMIGFGQVLLDNGYTSAATEIVWPLVRNDLSYVAQYWNQTGYDLWEEVNGSSFFTIAVQHRALVEGSAFATAVGSSCSWCDSQAPQILCYLQSFWTGSYILANFDSRRSGKDTNTLLGSIHTFDPEAGCDDSTFQPCSPRALANHKEVVDSFRSIYTLNDGLSDSEAVAVGRYPEDSYYNGNPWFQSTLAAAEQLYDALYQWDKQGSLEITDVSLDFFKALYSGAATGTYSSSSSTYSSIVSAVKTFADGFVSIVETHAASNGSLSEQFDKSDGDELSARDLTWSYAALLTANNRRNSVVPPSWGETSASSWPGTCAATSASGTYSSVTVTSWPSIVATGGTTTTATTTGSGGVTSTSKTTTTASKTSTTTSSTSCTTPTAVAVTFDLTATTTYGENIYLVGSISQLGDWETSDGIALSADKYTSSNPLWYVTVTLPAGESFEYKFIRVESDDSVEWESDPNREYTVPQACGESTATVTDTWR

SEQ ID NO: 21705 - protein, 639 aa, Aspergillus shirousami
MSFRSLLALSGLVCSGLASVISKRATLDSWLSNEATVARTAILNNIGADGAWVSGADSGIVVASPSTDNPDYFYTWTRDSGIVLKTLVDLFRNGDTDLLSTIEHYISSQAIIQGVSNPSGDLSSGGLGEPKFNVDETAYAGSWGRPQRDGPALRATAMIGFGQWLLDNGYTSAATEIVWPLVRNDLSYVAQYWNQTGYDLWEEVNGSSFFTIAVQHRALVEGSAFATAVGSSCSWCDSQAPQILCYLQSFWTGSYILANFDSSRSGKDTNTLLGSIHTFDPEAGCDDSTFQPCSPRALANHKEVVDSFRSIYTLNDGLSDSEAVAVGRYPEDSYYNGNPWFLCTLAAAEQLYDALYQWDKQGSLEITDVSLDFFKALYSGAATGTYSSSSSTYSSIVSAVKTFADGFVSIVETHAASNGSLSEQFDKSDGDELSARDLTWSYAALLTANNRRNSVVPPSWGETSASSVPGTCAATSASGTYSSVTVTSWPSIVATGGTTTTATTTGSGGVTSTSKTTTTASKTSTTTSSTSCTTPTAVAVTFDLTATTTYGENIYLVGSISQLGDWETSDGIALSADKYTSSNPPWYVTVTLPAGESFEYKFIRVESDDSVEWESDPNREYTVPQACGESTATVTDTWR

SEQ ID NO: 21706 - protein, 640 aa, Aspergillus niger; identical to SEQ ID NO: 21701

SEQ ID NO: 21707 - protein, 616 aa, Aspergillus niger; identical to SEQ ID NO: 1

SEQ ID NO: 21708 - protein, 313 aa, Aspergillus niger; identical to SEQ ID NO: 2

SEQ ID NO: 21709 - protein, 515 aa, Aspergillus niger; identical to SEQ ID NO: 3

SEQ ID NO: 21710 - protein, 184 aa, Aspergillus niger; identical to SEQ ID NO: 4

SEQ ID NO: 21711 - protein, 36 aa, Aspergillus niger; identical to SEQ ID NO: 5

SEQ ID NO: 21712 - protein, 108 aa, Aspergillus niger [sequence omitted]

SEQ ID NO: 21713 - protein, 114 aa, Aspergillus niger; identical to SEQ ID NO: 7

SEQ ID NO: 21714 - protein, 75 aa, Trichoderma reesei; identical to SEQ ID NO: 8

SEQ ID NO: 21715 - protein, 71 aa, Trichoderma reesei; identical to SEQ ID NO: 9

SEQ ID NO: 21716 - protein, 36 aa, Artificial Sequence; identical to SEQ ID NO: 10
  Description of Artificial Sequence: Synthetic polypeptide

SEQ ID NO: 21717 - protein, 36 aa, Artificial Sequence; identical to SEQ ID NO: 11
  Description of Artificial Sequence: Synthetic polypeptide

SEQ ID NO: 21718 - protein, 36 aa, Artificial Sequence; identical to SEQ ID NO: 12
  Description of Artificial Sequence: Synthetic polypeptide

SEQ ID NO: 21719 - protein, 36 aa, Artificial Sequence; identical to SEQ ID NO: 13
  Description of Artificial Sequence: Synthetic polypeptide

SEQ ID NO: 21720-22000 - skipped (281 entries)

SEQ ID NO: 22001 - protein, 423 aa, Aphanocladium album
MLSFVKKSIALVAALQAVTALATPISSEAGVEKRGSGFANAVYFTNWGIYGRNFQPADLPASEITHVLYSFMNVRADGTIFSGDTYADYEKHYAGDSWNDVGTNAYGCVKQLYLLKKQNRNMKVMLSIGGWTWSTNFPAAASSAATRKTFAQSAVGFMKDWGFDGIDIDWEYPADATQAQNMVLLLQAVRSELDSYAAQYAKGHHFLLSIAAPAGPDNYNKLKFAELGKVLDYINLMAYDYAGSWSNYTGHDANIYANPQNPNATPYNTDDAVQAYINGGVPANKIVLGMPIYGRSFQQTEGIGKPYNGIGSGSWENGIWDYKALPKAGATVKCDDTAKGCYSYDPSTKELISFDTPAMISTKVSWLKGKGLGGTMFWEASASKKGSDSLISTSHQGLGSQDSTQNYLDYPNSKYDNIKKGMN

SEQ ID NO: 22002 - protein, 20 aa, Acremonium sp.
WLSGVDKIRGVNLGSAFIIE

SEQ ID NO: 22003 - protein, 457 aa, Acremonium cellulolyticus
MLRYLSIVAATAILTGVEAQQSVWGQCGGQGWSGATSCAAGSTCSTLNPYYAQCIPGTATSTTLVKTTSSTSVGTTSPPTTTTTKASTTATTTAAASGNPFSGYQLYANPYYSSEVHTLAIPSLTGSLAAAATKAAEIPSFVWLDTAAKVPTMGTYLANIEAANKAGASPPIAGIFVVYDLPDRDCAAAASNGEYTVANNGVANYKAYIDSIVAQLKAYPDVHTILIIEPDSLANMVTNLSTAKCAEAQSAYYECVNYALINLNLANVAMYIDAGHAGWLGWSANLSPAAQLFATVYKNASAPASLRGLATNVANYNAWSISSPPSYTSGDSNYDEKLYINALSPLLTSNGWPNAHFIMDTSRNGVQPTKQQAWGDWCNVIGTGFGVQPTTNTGDPLEDAFVWVKPGGESDGTSNSSATRYDFHCGYSDALQPAPEAGTWFQAYFVQLLTNANPALV

SEQ ID NO: 22004 - protein, 523 aa, Acremonium thermophilum
MYTKFAALAALVATVRGQAACSLTAETHPSLQWQKCTAPGSCTTVSGQVTIDANWRWLHQTNSSTNCYTGNEWDTSICSSDTDCATKCCLDGADYTGTYGVTASGNSLNLKFVTQGPYSKNIGSRMYLMESESKYQGFTLLGQEFTFDVDVSNLGCGLNGALYFVSMDLDGGVSKYTTNKAGAKYGTGYCDSQCPRDLKFINGQANIDGWQPSSNDANAGLGNHGSCCSEMDIWEANKVSAAYTPHPCTTIGQTMCTGDDCGGTYSSDRYAGICDPDGCDFNSYRMGDTSFYGPGKTVDTGSKFTVVTQFLTGSDGNLSEIKRFYVQNGKVIPNSESKIAGVSGNSITTDFCTAQKTAFGDTNVFEERGGLAQMGKALAEPMVLVLSVWDDHAVNMLWLDSTYPTDSTKPGAARGDCPITSGVPADVESQAPNSNVIYSNIRFGPINSTYTGTPSGGNPPGGGTTTTTTTTTSKPSGPTTTTNPSGPQQTHWGQCGGQGWTGPTVCQSPYTCKYSNDWYSQCL

SEQ ID NO: 22005 - protein, 414 aa, Thielavia terrestris
MRSQAVWAAILAPATVSATLNDLAVRAGLKYFGTCLSESYINSDSQYAALINDKTEFGGLVPENGMKWDATEPSQGQFSFSQGDITANTAKKNGQVLRCHTLVWYSQLPGWVTSGSWTRSTLQSVMQTHITNVMGHYKGQCYAWDVVNEAIADDGTWRTSVFYNTFSTDYIPLAFNIAKTADPNAKLYYNDYNLEYNGAKTDTAVQLVQLVQSAGAPIDGVGFQGHLIVGSTPGRSSLATALKRFTALGLEVAYTELDIRHSSLPPSTSALATQGNDFANVVGSCLDVAGCIGVTVWGVTDKYSWIPQTFPGAGDALLYDDNYNKKPAWTSVSSVLAAKATSPPASSSTTLTTVITTAPTSTPTSTTAPTTTSSSNGAQQTHWGQCGGIGWTGATQCQSPYTCQKLNDWYYQCL

SEQ ID NO: 22006 - protein, 395 aa, Thielavia terrestris
MALKSLLLTSLATAGLVVADGLNVRAKAAGKKYFGTEISTTVMNDANANNIAKNSQDFGQYTCENEMKFDALEPSRGTFNYANADRIVAQAQANGMLMRCHNLVWHNQVPSWVTNGHFDNATLISIMKNHIANVVGHYKGKCYAWDVVNEALNEDGTYRTSGSVWGSTIGPAYIPIAFAAAAEADPDAKLYYNDYNCDRAGAKATGAQNLIKMVKQYGAPIHGFGMQGHLTTGQVGSASQYVSNMQAFAALGVEVAFTELDIATPSSNPNFQQQATDYATIVSACKQVDACVGITTWGFTDKYTWISNSDPLPWDSNLQKKPAYTAILNAWGSSPPPSTTTTTAATTTTPPSGGGGNGCTAPHWAQCGGIGYSGCTTCEAPYTCKYSNDWYSQCL

SEQ ID NO: 22007 - protein, 416 aa, Thielavia terrestris
MPSVVLSLAFLAGSAIAQQSVWGQCGGIGYSGPTSCVSGSCCVTLNAYYAQCTPGTGCGGGGSGTTLTTKTTTTTATATPTGGGGVGSGKTRFAGVNIAGFDFGCGTDGTCNTAKVYPPVKNYPPDYNHPDGAGQMQHFYRDDNMNIFRLPVGWQYLVNNNLGGSLDSTNFGYYDQLVQACLSTGAYCIIDIHNYARWNGAIIGQGGPTNEQFADLWRQIATKYANQPRIWFGIMNEPHDVPNISTWAATVQAAVTAIRNAGATSQFISLPGNDWQSAAAFISDGSAAALSAVKNPDGSTTNLIFDVHKYLDSDNSGTHTECVTNNIDSAFAPLATWLRQNNRQAILTETGGGNTASCQTYVCQQLAYLNQNSDVYLGYVGWAAGSFDSTYELDLTPTQNGNSWTDTALAKACFAR

SEQ ID NO: 22008 - protein, 86 aa, Thielavia terrestris
MYRTARATAVIAGALERLSALSSPGAGAQQNPAVVADQARGAVLFSCCDPADAVCGGTRFILPAHVLYALEATGPAAAFLEREDGF

SEQ ID NO: 22009 - protein, 389 aa, Thielavia terrestris
MHLLTWTSFLSLTLAAPVILPRASQLIPGHYIVKLKDGASESSLQNAISHLNSAPTKHVYRAGSFKGFAAPLSPQVLASLRKLPEVEFIEQDAVVTINSVVTQNNVPWGLARISHRQVNATTYLYDSSAGTGTCAYIIDTGIQVNHTQFEGRATFLANFIDSTDTDLNGHGTHVAGTTGSAAYGVAKQTRLFGVKVLDASGSGSLSSVIAGIDFVASDSANRTAAGQCANGSVANMSLGSGRSSTVNAAVASAVAKGVFFAVAAGNSDDDAAFYSPASEPTACTVGATDSSDARAWFSNYGSVVDVFAPGVDVLSSWIGASGTETNTISGTSMATPHITGLGAYLLGLLGRTTPAQLCQHIKDIATLGTITDLPDGTINAIAYNGISDA

SEQ ID NO: 22010 - protein, 627 aa, Thielavia terrestris
MTTVVRICVCGDEGTGKSSLIASLVKDTFVANKIQSVLPQVTLPPTIGTPENVTTTIVDTSARPQDRTTLRKEIRKCNVILLVYADHYSYERVALFWMPYFRSLGVNVPVVLCANKSDLAGSGSTPQVFDEEMLPVMAEFREIDSCIRTSAKEQHNVIEVFYLCQKAVTHPIAPLYDHKECQLKPACVAALKRVFYLCDKDQDGYLNDEEMHEFQEKSFEKPLLPEELNNIKLTVSKAVPTSSIEKGLDVHGFLYLNKLYAEKGRHETIWFILRKHHYTDSLSLEDSFLHPRFDVPDYASAELSPAGYRFFMDLFLTFDKDNDGGLNDQELAALFAPTPGLPQSWLETSFPSSTVRNEAGHITLQGWLAQWSMTTFLEPKTTLEYLAYLGFEGPNARDLTTAALKVTKPRKRRRRPGRVERNVVLCYIVGSAGAGKSSLLDAFLNRPFDGLYHPTIKPRRAVNSVELPGGKQCYLILEELGELEPAILENQAKLDACDLICYAYDSSEPDSFSHIVDLRKRYPQLDELPAIYTALKADRDKTTQRSELQPDAYTAALNMAAPLHVSVTWNSISELFVALAEAATNPSTAFPKSEEPPDRTSLYMALAATSCAALAAFMIWRRSTNSV

SEQ ID NO: 22011 - protein, 338 aa, Thielavia terrestris
MKFSILPSLLAGVVSVSAGTILWDGRFNDLSSSTDLNNWSWSNEVGPYQYYIHGPSPVTAYVNLSPDYKNPADTGSKQGAKITLDSTSYWNGQNMRRTELIPQTSAAINKGKVYYHFSLMRKDTNAPATTREHQIAFFESHFTELKSGLLSGASGVSDTSLRWCVSGQTQWSTEWVADVWHNVAYEIDFNANTVGFWHSTGSDALVRVVAPVSVSTSSNGADWHVGVLELPRSGYSDTTEDFYFSGVYIESGSLTTSVSGPGSPSGGNGSSSAPGSSTTTTKVSSSTTTSAATPTSSAGGGCTASQWAQCGGINYSGCTTCAAPYTCKYLNDWYSQCQ

SEQ ID NO: 22012 - protein, 840 aa, Thielavia terrestris
MKHQSVAQLLVAAVAAPVTAAAASWKNVNIGGGGGFIPSIVFHPTAKGVAYARTDIGGLYRLNSDDSWTPVTDSLATDARWGDWGIDALALDPQDPNKVYAAVGMYTNSWDPNPGSIIRSSDKGATWASTDLPFKVGGNMPGRGMGERLAVDPANSNILYFGARSGNGLWKSTDGGVTWAKVTSFPNPGTYRPDPTDTTGLNSDIIGLTFVTFDSTSGLTNGATSRIFVGTADNITASVYVSTDAGATWSAVPGQPGKYFPHKCRLQPTEKALYLTYSDGAGPYDGTLGAVYRYDLTTSTWKDITPVSGSDLYFGFGGLGVDMQKPGTIMVASLNSWWPDAQIFRSNDSGTTWTKIWEWTSYPNQNWYYALYTDNAPWINAGFISQDTKRLGWMIESLEIDPFDSNHWLYGTGLTLYGGHDLTKWDTATRNVTISSLAVGIEEMSVQGLASVPGGSELLVAVGDDCGFTFQSSSDLGTPPETNWMTPEWSTSSDVDYAGNKPQNVVRVGNANGSPQIALSTDGGATWYADYATDNTKSGGTLAFSADADTILWSSGNSGVLISQNQGTFTAVSAVPSGAAIAADKRNNTVFYAGSGGDFYRSTDTGTTFTKTASAFGSAVSSIQDIAAHPAVAGEVWVSTNAGLFRSTDYGVTFAQVGAGSLTKTQQIAFGKGTGGANSWNLYAFGTGSAGAKLYASADNGATWVDIQGTQGFGAISANKVVGSGNVAGQVYVGTNGRGVFYAQVSVAGGGGGSSSTARPSSTSTSTTSKTTLTTSTIKTTSVTTTSTSTVKSTSTTTSAAPQATQSHWGQCGGQGWTGPTVCASPYTCQKQNDWYWQCL

SEQ ID NO: 22013 - protein, 297 aa, Thielavia terrestris
MVGFSNIVLGLSAAAATLAAPTAERGAANFVLHPDHPLARRIGNLTARSNPSYTQNYQTGGTVNFTPTGTGFTLNYNVQQDFVVGVGWNPGSNQPITHSGTFTVNSGLGSLSVYGWSTNPLVEYYIMEVNDGITVGGQQMGTVESDGGTYTIWKHQQVNQPAIAGSGLYTFWQYISIRDSPRTSGTVTVQNHFDAWAKLGMNLGTMNLQVVAVESWSGSGSAQQTVYNGGSGSTGGSGGGNGGSSGGNGGSSGGSGGSTGTCSALWGQCGGQGWTGPTCCSQGTCKAQNQWYSQCLQ

SEQ ID NO: 22014 - DNA, 18 bp, Artificial Sequence
  Description of Artificial Sequence: Synthetic oligonucleotide
gatctgtccagcggcgct

SEQ ID NO: 22015 - DNA, 18 bp, Artificial Sequence
  Description of Artificial Sequence: Synthetic oligonucleotide
aaactgataataggcaga

SEQ ID NO: 22016 - DNA, 18 bp, Artificial Sequence
  Description of Artificial Sequence: Synthetic oligonucleotide
aagctgatgacgggcacg

SEQ ID NO: 22017 - DNA, 18 bp, Artificial Sequence
  Description of Artificial Sequence: Synthetic oligonucleotide
aagctgatgacgggcacg

SEQ ID NO: 22018 - DNA, 18 bp, Artificial Sequence
  Description of Artificial Sequence: Synthetic oligonucleotide
aagctgatgacgggcacg

SEQ ID NO: 22019 - DNA, 18 bp, Artificial Sequence
  Description of Artificial Sequence: Synthetic oligonucleotide
acactgacgacaggcatg

SEQ ID NO: 22020 - DNA, 18 bp, Artificial Sequence
  Description of Artificial Sequence: Synthetic oligonucleotide
acactgacgacgggcatg

SEQ ID NO: 22021 - DNA, 18 bp, Artificial Sequence
  Description of Artificial Sequence: Synthetic oligonucleotide
acactgatgaggggcaag

SEQ ID NO: 22022 - DNA, 18 bp, Artificial Sequence
  Description of Artificial Sequence: Synthetic oligonucleotide
acgctgaggacgggcatg

SEQ ID NO: 22023 - DNA, 18 bp, Artificial Sequence
  Description of Artificial Sequence: Synthetic oligonucleotide
acgctgaggacgggcatg

SEQ ID NO: 22024 - DNA, 18 bp, Artificial Sequence
  Description of Artificial Sequence: Synthetic oligonucleotide
acgctgaggacgggcatg

SEQ ID NO: 22025 - DNA, 18 bp, Artificial Sequence
  Description of Artificial Sequence: Synthetic oligonucleotide
agactgataataggcaga

SEQ ID NO: 22026 - DNA, 18 bp, Artificial Sequence
  Description of Artificial Sequence: Synthetic oligonucleotide
agactgataataggcaga

SEQ ID NO: 22027 - DNA, 18 bp, Artificial Sequence
  Description of Artificial Sequence: Synthetic oligonucleotide
atgctgaaaaagggcatg

SEQ ID NO: 22028 - DNA, 18 bp, Artificial Sequence
  Description of Artificial Sequence: Synthetic oligonucleotide
atgctgaaaaagggcatg

SEQ ID NO: 22029 - DNA, 18 bp, Artificial Sequence
  Description of Artificial Sequence: Synthetic oligonucleotide
atgctgaaaaagggcatg

SEQ ID NO: 22030 - DNA, 17 bp, Artificial Sequence
  Description of Artificial Sequence: Synthetic oligonucleotide
aactgagaaagggcagg

SEQ ID NO: 22031 - DNA, 17 bp, Artificial Sequence
  Description of Artificial Sequence: Synthetic oligonucleotide
aactgagaaagggcagg

SEQ ID NO: 22032 - DNA, 18 bp, Artificial Sequence
  Description of Artificial Sequence: Synthetic oligonucleotide
aagctgaagaagggcata

SEQ ID NO: 22033 - DNA, 18 bp, Artificial Sequence
  Description of Artificial Sequence: Synthetic oligonucleotide
aagctgaagagaggcaca

SEQ ID NO: 22034 - DNA, 18 bp, Artificial Sequence
  Description of Artificial Sequence: Synthetic oligonucleotide
aagctgacgagaggcata

SEQ ID NO: 22035 - DNA, 18 bp, Artificial Sequence
  Description of Artificial Sequence: Synthetic oligonucleotide
aagctgaggacaggcaag

SEQ ID NO: 22036 - DNA, 18 bp, Artificial Sequence
  Description of Artificial Sequence: Synthetic oligonucleotide
acactgaggaggggcacg

SEQ ID NO: 22037 - DNA, 18 bp, Artificial Sequence
  Description of Artificial Sequence: Synthetic oligonucleotide
aggctgaaaaaaggcaga

SEQ ID NO: 22038 - DNA, 18 bp, Artificial Sequence
  Description of Artificial Sequence: Synthetic oligonucleotide
aggctgaaaaagggcaag

SEQ ID NO: 22039 - DNA, 18 bp, Artificial Sequence
  Description of Artificial Sequence: Synthetic oligonucleotide
aggctgaaaacaggcagg

SEQ ID NO: 22040 - DNA, 18 bp, Artificial Sequence
  Description of Artificial Sequence: Synthetic oligonucleotide
aggctgatgatgggcaag

SEQ ID NO: 22041 - DNA, 18 bp, Artificial Sequence
  Description of Artificial Sequence: Synthetic oligonucleotide
aggctgatgatgggcaag

SEQ ID NO: 22042 - DNA, 18 bp, Artificial Sequence
  Description of Artificial Sequence: Synthetic oligonucleotide
aggctgatgatgggcaag

SEQ ID NO: 22043 - DNA, 18 bp, Artificial Sequence
  Description of Artificial Sequence: Synthetic oligonucleotide
tcatggttgagcaacgaa

SEQ ID NO: 22044 - DNA, 18 bp, Artificial Sequence
  Description of Artificial Sequence: Synthetic oligonucleotide
tcatggttgagcaacgaa

SEQ ID NO: 22045 - DNA, 12 bp, Artificial Sequence
  Description of Artificial Sequence: Synthetic oligonucleotide
agtgacagcgag

SEQ ID NO: 22046 - DNA, 12 bp, Artificial Sequence
  Description of Artificial Sequence: Synthetic oligonucleotide
ataacgtttaag

SEQ ID NO: 22047 - DNA, 12 bp, Artificial Sequence
  Description of Artificial Sequence: Synthetic oligonucleotide
ataacgtttaag

SEQ ID NO: 22048 - DNA, 12 bp, Artificial Sequence
  Description of Artificial Sequence: Synthetic oligonucleotide
ataacgtttaag

SEQ ID NO: 22049 - DNA, 12 bp, Artificial Sequence
  Description of Artificial Sequence: Synthetic oligonucleotide
agaagattgaga

SEQ ID NO: 22050 - DNA, 12 bp, Artificial Sequence
  Description of Artificial Sequence: Synthetic oligonucleotide
acgaagattagg

SEQ ID NO: 22051 - DNA, 12 bp, Artificial Sequence
  Description of Artificial Sequence: Synthetic oligonucleotide
  modified_base (11)..(11): a, c, t, g, unknown or other
aaaaggttcana

SEQ ID NO: 22052 - DNA, 12 bp, Artificial Sequence
  Description of Artificial Sequence: Synthetic oligonucleotide
agaagattgaga

SEQ ID NO: 22053 - DNA, 12 bp, Artificial Sequence
  Description of Artificial Sequence: Synthetic oligonucleotide
acgatgttgata

SEQ ID NO: 22054 - DNA, 12 bp, Artificial Sequence
  Description of Artificial Sequence: Synthetic oligonucleotide
acgatgttgata

SEQ ID NO: 22055 - DNA, 12 bp, Artificial Sequence
  Description of Artificial Sequence: Synthetic oligonucleotide
acgatgttgata

SEQ ID NO: 22056 - DNA, 12 bp, Artificial Sequence
  Description of Artificial Sequence: Synthetic oligonucleotide
aaaatggtcaaa

SEQ ID NO: 22057 - DNA, 12 bp, Artificial Sequence
  Description of Artificial Sequence: Synthetic oligonucleotide
aaaatggtcaaa

SEQ ID NO: 22058 - DNA, 12 bp, Artificial Sequence
  Description of Artificial Sequence: Synthetic oligonucleotide
aagatgatgaca

SEQ ID NO: 22059 - DNA, 12 bp, Artificial Sequence
  Description of Artificial Sequence: Synthetic oligonucleotide
aagatgatgaca

SEQ ID NO: 22060 - DNA, 12 bp, Artificial Sequence
  Description of Artificial Sequence: Synthetic oligonucleotide
aagatgatgaca

SEQ ID NO: 22061 - DNA, 12 bp, Artificial Sequence
  Description of Artificial Sequence: Synthetic oligonucleotide
ataatattgaag

SEQ ID NO: 22062 - DNA, 12 bp, Artificial Sequence
  Description of Artificial Sequence: Synthetic oligonucleotide
acaaaggtgagg

SEQ ID NO: 22063 - DNA, 12 bp, Artificial Sequence
  Description of Artificial Sequence: Synthetic oligonucleotide
agtgacagcgag

SEQ ID NO: 22064 - DNA, 12 bp, Artificial Sequence
  Description of Artificial Sequence: Synthetic oligonucleotide
acaaaggtgagg

SEQ ID NO: 22065 - DNA, 12 bp, Artificial Sequence
  Description of Artificial Sequence: Synthetic oligonucleotide
agaaaagtgaca

SEQ ID NO: 22066 - DNA, 12 bp, Artificial Sequence
  Description of Artificial Sequence: Synthetic oligonucleotide
aagatattcagg

SEQ ID NO: 22067 - DNA, 12 bp, Artificial Sequence
  Description of Artificial Sequence: Synthetic oligonucleotide
agaatgatgacg

SEQ ID NO: 22068 - DNA, 12 bp, Artificial Sequence
  Description of Artificial Sequence: Synthetic oligonucleotide
acaagggtcagg

SEQ ID NO: 22069 - DNA, 12 bp, Artificial Sequence
  Description of Artificial Sequence: Synthetic oligonucleotide
atgaaaattacg

SEQ ID NO: 22070 - DNA, 12 bp, Artificial Sequence
  Description of Artificial Sequence: Synthetic oligonucleotide
acgaaaataaca

SEQ ID NO: 22071 - DNA, 12 bp, Artificial Sequence
  Description of Artificial Sequence: Synthetic oligonucleotide
aaaaaaatcaga

SEQ ID NO: 22072 - DNA, 12 bp, Artificial Sequence
  Description of Artificial Sequence: Synthetic oligonucleotide
aaaaaaatcaga

SEQ ID NO: 22073 - DNA, 12 bp, Artificial Sequence
  Description of Artificial Sequence: Synthetic oligonucleotide
aaaaaaatcaga

SEQ ID NO: 22074 - DNA, 12 bp, Artificial Sequence
  Description of Artificial Sequence: Synthetic oligonucleotide
acgaaggtgagg

SEQ ID NO: 22075 - DNA, 12 bp, Artificial Sequence
  Description of Artificial Sequence: Synthetic oligonucleotide
acaaaggtgagg

SEQ ID NO: 22076 - DNA, 15 bp, Artificial Sequence
  Description of Artificial Sequence: Synthetic oligonucleotide
tctgatggcgagcag

SEQ ID NO: 22077 - DNA, 15 bp, Artificial Sequence
  Description of Artificial Sequence: Synthetic oligonucleotide
ttaacgggcttgctg

SEQ ID NO: 22078 - DNA, 15 bp, Artificial Sequence
  Description of Artificial Sequence: Synthetic oligonucleotide
ttaacgggcttgctg

SEQ ID NO: 22079 - DNA, 15 bp, Artificial Sequence
  Description of Artificial Sequence: Synthetic oligonucleotide
ttaacgggcttgctg

SEQ ID NO: 22080 - DNA, 15 bp, Artificial Sequence
  Description of Artificial Sequence: Synthetic oligonucleotide
ctgagaggcgttata

SEQ ID NO: 22081 - DNA, 15 bp, Artificial Sequence
  Description of Artificial Sequence: Synthetic oligonucleotide
atgaggggcctcgtg

SEQ ID NO: 22082 - DNA, 15 bp, Artificial Sequence
  Description of Artificial Sequence: Synthetic oligonucleotide
  modified_base (2)..(3): a, c, t, g, unknown or other
  modified_base (5)..(5): a, c, t, g, unknown or other
  modified_base (13)..(13): a, c, t, g, unknown or other
gnnanaggcgtgntg

SEQ ID NO: 22083 - DNA, 15 bp, Artificial Sequence
  Description of Artificial Sequence: Synthetic oligonucleotide
ctgagaggcgttata

SEQ ID NO: 22084 - DNA, 15 bp, Artificial Sequence
  Description of Artificial Sequence: Synthetic oligonucleotide
gtgaggggccttgtt

SEQ ID NO: 22085 - DNA, 15 bp, Artificial Sequence
  Description of Artificial Sequence: Synthetic oligonucleotide
gtcaaaggcgtagta

SEQ ID NO: 22086 - DNA, 15 bp, Artificial Sequence
  Description of Artificial Sequence: Synthetic oligonucleotide
gtcaaaggcgtagta

SEQ ID NO: 22087 - DNA, 15 bp, Artificial Sequence
  Description of Artificial Sequence: Synthetic oligonucleotide
atgagaggccttctc

SEQ ID NO: 22088 - DNA, 15 bp, Artificial Sequence
  Description of Artificial Sequence: Synthetic oligonucleotide
gtcaaaggcgtagta

SEQ ID NO: 22089 - DNA, 15 bp, Artificial Sequence
  Description of Artificial Sequence: Synthetic oligonucleotide
gtcaagggcatcgtg

SEQ ID NO: 22090 - DNA, 15 bp, Artificial Sequence
  Description of Artificial Sequence: Synthetic oligonucleotide
gtcaagggcatcgtg

SEQ ID NO: 22091 - DNA, 15 bp, Artificial Sequence
  Description of Artificial Sequence: Synthetic oligonucleotide
gtcaagggcatcgtg

SEQ ID NO: 22092 - DNA, 15 bp, Artificial Sequence
  Description of Artificial Sequence: Synthetic oligonucleotide
ttcatgggcctcgtt

SEQ ID NO: 22093 - DNA, 15 bp, Artificial Sequence
  Description of Artificial Sequence: Synthetic oligonucleotide
gtcataggcgttttg

SEQ ID NO: 22094 - DNA, 15 bp, Artificial Sequence
  Description of Artificial Sequence: Synthetic oligonucleotide
tctgatggcgagcag

SEQ ID NO: 22095 - DNA, 15 bp, Artificial Sequence
  Description of Artificial Sequence: Synthetic oligonucleotide
gtgaaaggctttatg

SEQ ID NO: 22096 - DNA, 15 bp, Artificial Sequence
  Description of Artificial Sequence: Synthetic oligonucleotide
tttaaaggcatcttt

SEQ ID NO: 22097 - DNA, 15 bp, Artificial Sequence
  Description of Artificial Sequence: Synthetic oligonucleotide
tttatgggcgtggtg

SEQ ID NO: 22098 - DNA, 15 bp, Artificial Sequence
  Description of Artificial Sequence: Synthetic oligonucleotide
ctaacaggccttttt

SEQ ID NO: 22099 - DNA, 15 bp, Artificial Sequence
  Description of Artificial Sequence: Synthetic oligonucleotide
atgaggggcctcgtg

SEQ ID NO: 22100 - DNA, 15 bp, Artificial Sequence
  Description of Artificial Sequence: Synthetic oligonucleotide
  modified_base (3)..(3): a, c, t, g, unknown or other
  modified_base (5)..(5): a, c, t, g, unknown or other
  modified_base (10)..(10): a, c, t, g, unknown or other
ctnangggcntcatg

SEQ ID NO: 22101 - DNA, 15 bp, Artificial Sequence
  Description of Artificial Sequence: Synthetic oligonucleotide
ttaagaggcgtggtg

SEQ ID NO: 22102 - DNA, 15 bp, Artificial Sequence
  Description of Artificial Sequence: Synthetic oligonucleotide
ttaaaaggcatgatg

SEQ ID NO: 22103 - DNA, 15 bp, Artificial Sequence
  Description of Artificial Sequence: Synthetic oligonucleotide
ttaaaaggcatgatg

SEQ ID NO: 22104 - DNA, 15 bp, Artificial Sequence
  Description of Artificial Sequence: Synthetic oligonucleotide
ttaaaaggcatgatg

SEQ ID NO: 22105 - DNA, 6 bp, Artificial Sequence
  Description of Artificial Sequence: Synthetic oligonucleotide
tggttc

SEQ ID NO: 22106 - DNA, 6 bp, Artificial Sequence
  Description of Artificial Sequence: Synthetic oligonucleotide
tggttc

SEQ ID NO: 22107 - DNA, 15 bp, Artificial Sequence
  Description of Artificial Sequence: Synthetic oligonucleotide
gcggccacatctgcc

SEQ ID NO: 22108 - DNA, 15 bp, Artificial Sequence
  Description of Artificial Sequence: Synthetic oligonucleotide
ctatttacatctata

SEQ ID NO: 22109 - DNA, 15 bp, Artificial Sequence
  Description of Artificial Sequence: Synthetic oligonucleotide
ctatttacatctata

SEQ ID NO: 22110 - DNA, 15 bp, Artificial Sequence
  Description of Artificial Sequence: Synthetic oligonucleotide
ctatttacatctata

SEQ ID NO: 22111 - DNA, 15 bp, Artificial Sequence
  Description of Artificial Sequence: Synthetic oligonucleotide
ctagtaacatctatg

SEQ ID NO: 22112 - DNA, 15 bp, Artificial Sequence
  Description of Artificial Sequence: Synthetic oligonucleotide
gtattgacatctgtc

SEQ ID NO: 22113 - DNA, 15 bp, Artificial Sequence
  Description of Artificial Sequence: Synthetic oligonucleotide
  modified_base (3)..(4): a, c, t, g, unknown or other
  modified_base (15)..(15): a, c, t, g, unknown or other
atnntgacatctatn

SEQ ID NO: 22114 - DNA, 15 bp, Artificial Sequence
  Description of Artificial Sequence: Synthetic oligonucleotide
ctagtaacatctatg

SEQ ID NO: 22115 - DNA, 15 bp, Artificial Sequence
  Description of Artificial Sequence: Synthetic oligonucleotide
ttggtgacatctatg

SEQ ID NO: 22116 - DNA, 15 bp, Artificial Sequence
  Description of Artificial Sequence: Synthetic oligonucleotide
tttgtgacatctttg

SEQ ID NO: 22117 - DNA, 15 bp, Artificial Sequence
  Description of Artificial Sequence: Synthetic oligonucleotide
tttgtgacatctttg

SEQ ID NO: 22118 - DNA, 15 bp, Artificial Sequence
  Description of Artificial Sequence: Synthetic oligonucleotide
gttctgacatctatt

SEQ ID NO: 22119 - DNA, 15 bp, Artificial Sequence
  Description of Artificial Sequence: Synthetic oligonucleotide
tttgtgacatctttg

SEQ ID NO: 22120 - DNA, 15 bp, Artificial Sequence
  Description of Artificial Sequence: Synthetic oligonucleotide
cttgtgacatctttc

SEQ ID NO: 22121 - DNA, 15 bp, Artificial Sequence
  Description of Artificial Sequence: Synthetic oligonucleotide
cttgtgacatctttc

SEQ ID NO: 22122 - DNA, 15 bp, Artificial Sequence
  Description of Artificial Sequence: Synthetic oligonucleotide
cttgtgacatctttc

SEQ ID NO: 22123 - DNA, 15 bp, Artificial Sequence
  Description of Artificial Sequence: Synthetic oligonucleotide
ttcgtcacatctata

SEQ ID NO: 22124 - DNA, 15 bp, Artificial Sequence
  Description of Artificial Sequence: Synthetic oligonucleotide
ttactaacatctctc

SEQ ID NO: 22125 - DNA, 15 bp, Artificial Sequence
  Description of Artificial Sequence: Synthetic oligonucleotide
gcggccacatctgcc

SEQ ID NO: 22126 - DNA, 15 bp, Artificial Sequence
  Description of Artificial Sequence: Synthetic oligonucleotide
gttttgacatctgtg

SEQ ID NO: 22127 - DNA, 15 bp, Artificial Sequence
  Description of Artificial Sequence: Synthetic oligonucleotide
gtgttcacatctttc

SEQ ID NO: 22128 - DNA, 15 bp, Artificial Sequence
  Description of Artificial Sequence: Synthetic oligonucleotide
  modified_base (9)..(9): a, c, t, g, unknown or other
ttgatgacntctgtt

SEQ ID NO: 22129 - DNA, 15 bp, Artificial Sequence
  Description of Artificial Sequence: Synthetic oligonucleotide
ttactaacatctctc

SEQ ID NO: 22130 - DNA, 15 bp, Artificial Sequence
  Description of Artificial Sequence: Synthetic oligonucleotide
gtattgacatctgtc

SEQ ID NO: 22131 - DNA, 15 bp, Artificial Sequence
  Description of Artificial Sequence: Synthetic oligonucleotide
  modified_base (3)..(4): a, c, t, g, unknown or other
  modified_base (13)..(13): a, c, t, g, unknown or other
ctnntgacatctnta

SEQ ID NO: 22132 - DNA, 15 bp, Artificial Sequence
  Description of Artificial Sequence: Synthetic oligonucleotide
cttattacatctgtg

SEQ ID NO: 22133 - DNA, 15 bp, Artificial Sequence
  Description of Artificial Sequence: Synthetic oligonucleotide
gttatcacatctctg

SEQ ID NO: 22134 - DNA, 15 bp, Artificial Sequence
  Description of Artificial Sequence: Synthetic oligonucleotide
gttatcacatctctg

SEQ ID NO: 22135 - DNA, 15 bp, Artificial Sequence
  Description of Artificial Sequence: Synthetic oligonucleotide
gttatcacatctctg

SEQ ID NO: 22136 - DNA, 15 bp, Artificial Sequence
  Description of Artificial Sequence: Synthetic oligonucleotide
gtgattacatcttta

SEQ ID NO: 22137 - DNA, 15 bp, Artificial Sequence
  Description of Artificial Sequence: Synthetic oligonucleotide
gtgattacatcttta

SEQ ID NO: 22138 - protein, 6 aa, Artificial Sequence
  Description of Artificial Sequence: Synthetic 6xHis tag
HHHHHH

SEQ ID NO: 22139 - protein, 4 aa, Bacillus subtilis
YAAI

SEQ ID NO: 22140 - protein, 4 aa, Bacillus subtilis
NTSA

SEQ ID NO: 22141 - protein, 6 aa, Bacillus subtilis
SHYASD

SEQ ID NO: 22142 - protein, 4 aa, Bacillus subtilis
QPEE

SEQ ID NO: 22143 - protein, 6 aa, Artificial Sequence
  Description of Artificial Sequence: Synthetic peptide
DLSSGA

SEQ ID NO: 22144 - protein, 4 aa, Artificial Sequence
  Description of Artificial Sequence: Synthetic peptide
SDSE

SEQ ID NO: 22145 - protein, 5 aa, Artificial Sequence
  Description of Artificial Sequence: Synthetic peptide
SDGEQ

SEQ ID NO: 22146 - protein, 5 aa, Artificial Sequence
  Description of Artificial Sequence: Synthetic peptide
AATSA

SEQ ID NO: 22147-45000 - skipped (22854 entries)

SEQ ID NO: 45001 - protein, 634 aa, Bacillus subtilis
ETANKSNELTAPSIKSGTILHAWNWSFNTLKHNMKDIHDAGYTAIQTSPINQVKEGNQGDKSMSNWYWLYQPTSYQIGNRYLGTEQEFKEMCAAAEEYGIKVIVDAVINHTTSDYAAISNEVKSIPNWTHGNTQIKNWSDRWDVTQNSLLGLYDWNTQNTQVQSYLKRFLDRALNDGADGFRFDAAKHIELPDDGSYGSQFWPNITNTSAEFQYGEILQDSASRDAAYANYMDVTASNYGHSIRSALKNRNLGVSNISHYASDVSADKLVTWVESHDTYANDDEESTWMSDDDIRLGWAVIASRSGSTPLFFSRPEGGGNGVRFPGKSQIGDRGSALFEDQAITAVNRFHNVMAGQPEELSNPNGNNQIFMNQRGSHGVVLANAGSSSVSINTATKLPDGRYDNKAGAGSFQVNDGKLTGTINARSVAVLYPDDIAKAPHVFLENYKTGVTHSFNDQLTITLRADANTTKAVYQINNGPETAFKDGDQFTIGKGDPFGKTYTIMLKGTNSDGVTRTEKYSFVKRDPASAKTIGYQNPNHWSQVNAYIYKHDGSRVIELTGSWPGKPMTKNADGIYTLTLPADTDTTNAKVIFNNGSAQVPGQNQPGFDYVLNGLYNDSGLSGSLPHDYKDDDDK

SEQ ID NO: 45002 - protein, 634 aa, Artificial Sequence
  Description of Artificial Sequence: Synthetic polypeptide
ETANKSNELTAPSIKSGTILHAWNWSFNTLKHNMKDIHDAGYTAIQTSPINQVKEGNQGDKSMSNWYWLYQPTSYQIGNRYLGTEQEFKEMCAAAEEYGIKVIVDAVINHTTSDYAAISNEVKSIPNWTHGNTQIKNWSDRWDVTQNSLLGLYDWNTQNTQVQSYLKRFLDRALNDGADGFRFDAAKHIELPDDGSYGSQFWPNITNTFAEFQYGEILQDSASRDAAYANYMDVTASNYGHSIRSALKNRNLGVSNISHYASDVSADKLVTWVESHDTYANDDEESTWMSDDDIRLGWAVIASRSGSTPLFFSRPEGGGNGVRFPGKSQIGDRGSALFEDQAITAVNRFHNVMAGLPEELSNPNGNNQIFMNQRGSHGVVLANAGSSSVSINTATKLPDGRYDNKAGAGSFQVNDGKLTGTINARSVAVLYPDDIAKAPHVFLENYKTGVTHSFNDQLTITLRADANTTKAVYQINNGPETAFKDGDQFTIGKGDPFGKTYTIMLKGTNSDGVTRTEKYSFVKRDPASAKTIGYQNPNHWSQVNAYIYKHDGSRVIELTGSWPGKPMTKNADGIYTLTLPADTDTTNAKVIFNNGSAQVPGQNQPGFDYVLNGLYNDSGLSGSLPHDYKDDDDK

SEQ ID NO: 45003 - protein, 621 aa, Artificial Sequence
  Description of Artificial Sequence: Synthetic polypeptide
  MOD_RES (244)..(244): Any amino acid
ETANKSNELTAPSIKSGTILHAWNWSFNTLKHNMKDIHDAGYTAIQTSPINQVKEGNQGDKSMSNWYWLYQPTSYQIGNRYLGTEQEFKEMCAAAEEYGIKVIVDAVINHTTSDYAAISNEVKSIPNWTHGNTQIKNWSDRWDVTQNSLLGLYDWNTQNTQVQSYLKRFLDRALNDGADGFRFDAAKHIELPDDGSYGSQFWPNITNTSAEFQYGEILQDSASRDAAYANYMDVTASNYGHSIXSALKNRNLGVSNISHYASDVSADKLVTWVEWMSDDDIRLGWAVIASRSGSTPLFFSRPEGGGNGVRFPGKSQIGDRGSALFEDQAITAVNRFHNVMAGQPEELSNPNGNNQIFMNQRGSHGVVLANAGSSSVSINTATKLPDGRYDNKAGAGSFQVNDGKLTGTINARSVAVLYPDDIAKAPHVFLENYKTGVTHSFNDQLTITLRADANTTKAVYQINNGPETAFKDGDQFTIGKGDPFGKTYTIMLKGTNSDGVTRTEKYSFVKRDPASAKTIGYQNPNHWSQVNAYIYKHDGSRVIELTGSWPGKPMTKNADGIYTLTLPADTDTTNAKVIFNNGSAQVPGQNQPGFDYVLNGLYNDSGLSGSLPHDYKDDDDK

SEQ ID NO: 45004 - protein, 635 aa, Artificial Sequence
  Description of Artificial Sequence: Synthetic polypeptide
ETANKSNELTAPSIKSGTILHAWNWSFNTLKHNMKDIHDAGYTAIQTSPINQVKEGNQGDKSMSNWYWLYQPTSYQIGNRYLGTEQEFKEMCAAAEEYGIKVIVDAVINHTTSDVVGIMSNEVKSIPNWTHGNTQIKNWFDRWDVTQNSLLGLYDWNTQNTQVQSYLKRFLDRALNDGADGFRFDAAKHIELPDDGSYGSQFWPNITKILTEFQYGEILQDSASRDAAYANYMDVTASNYGHSIRSALKNRNLGVSNIMTYVLTVSADKLVTWVESHDTYANDDEESTWMSDDDIRLGWAVIASRSGSTPLFFSRPEGGGNGVRFPGKSQIGDRGSALFEDQAITAVNRFHNVMAGVPETLSNPNGNNQIFMNQRGSHGVVLANAGSSSVSINTATKLPDGRYDNKAGAGSFQVNDGKLTGTINARSVAVLYPDDIAKAPHVFLENYKTGVTHSFNDQLTITLRADANTTKAVYQINNGPETAFKDGDQFTIGKGDPFGKTYTIMLKGTNSDGVTRTEKYSFVKRDPASAKTIGYQNPNHWSQVNAYIYKHDGSRVIELTGSWPGKPMTKNADGIYTLTLPADTDTTNAKVIFNNGSAQVPGQNQPGFDYVLNGLYNDSGLSGSLPHDYKDDDDK

SEQ ID NO: 45005 - protein, 635 aa, Artificial Sequence
  Description of Artificial Sequence: Synthetic polypeptide
ETANKSNELTAPSIKSGTILHAWNWSFNTLKHNMKDIHDAGYTAIQTSPINQVKEGNQGDKSMSNWYWLYQPTSYQIGNRYLGTEQEFKEMCAAAEEYGIKVIVDAVINHTTSDVVGFMSNEVKSIPNWTHGNTQIKNWSDRWDVTQNSLLGLYDWNTQNTQVQSYLKRFLDRALNDGADGFRFDAAKHIELPDDGSYGSQFWPNITNTSAEFQYGEILQDSASRDAAYANYMDVTASNYGHSIRSALKNRNLGVSNISHYASDVSADKLVTWVESHDTYANDDEESTWMSDDDIRLGWAVIASRSGSTPLFFSRPEGGGNGVRFPGKSQIGDRGSALFEDQAITAVNRFHNVMAGQPEELSNPNGNNQIFMNQRGSHGVVLANAGSSSVSINTATKLPDGRYDNKAGAGSFQVNDGKLTGTINARSVAVLYPDDIAKAPHVFLENYKTGVTHSFNDQLTITLRADANTTKAVYQINNGPETAFKDGDQFTIGKGDPFGKTYTIMLKGTNSDGVTRTEKYSFVKRDPASAKTIGYQNPNHWSQVNAYIYKHDGSRVIELTGSWPGKPMTKNADGIYTLTLPADTDTTNAKVIFNNGSAQVPGQNQPGFDYVLNGLYNDSGLSGSLPHDYKDDDDK

SEQ ID NO: 45006 - protein, 635 aa, Artificial Sequence
  Description of Artificial Sequence: Synthetic polypeptide
ETANKSNELTAPSIKSGTILHAWNWSFNTLKHNMKDIHDAGYTAIQTSPINQVKEGNQGDKSMSNWYWLYQPTSYQIGNRYLGTEQEFKEMCAAAEEYGIKVIVDAVINHTTSDMVGVMSNEVKSIPNWTHGNTQIKNWSDRWDVTQNSLLGLYDWNTQNTQVQSYLKRFLDRALNDGADGFRFDAAKHIELPDDGSYGSQFWPNITNTSAEFQYGEILQDSASRDAAYANYMDVTASNYGHSIRSALKNRNLGVSNISHYAFDVSADKLVTWVESHDTYANDDEESTWMSDDDIRLGWAVIASRSGSTPLFFSRPEGGGNGVRFPGKSQIGDRGSALFEDQAITAVNRFHNVMAGQPVELSNPNGNNQIFMNQRGSHGVVLANAGSSSVSINTATKLPDGRYDNKAGAGSFQVNDGKLTGTINARSVAVLYPDDIAKAPHVFLENYKTGVTHSFNDQLTITLRADANTTKAVYQINNGPETAFKDGDQFTIGKGDPFGKTYTIMLKGTNSDGVTRTEKYSFVKRDPASAKTIGYQNPNHWSQVNAYIYKHDGSRVIELTGSWPGKPMTKNADGIYTLTLPADTDTTNAKVIFNNGSAQVPGQNQPGFDYVLNGLYNDSGLSGSLPHDYKDDDDK

SEQ ID NO: 45007 - protein, 634 aa, Artificial Sequence
  Description of Artificial Sequence: Synthetic polypeptide
  MOD_RES (209)..(209): Any amino acid
  MOD_RES (262)..(262): Any amino acid
ETANKSNELTAPSIKSGTILHAWNWSFNTLKHNMKDIHDAGYTAIQTSPINQVKEGNQGDKSMSNWYWLYQPTSYQIGNRYLGTEQEFKEMCAAAEEYGIKVIVDAVINHTTSDYAVISNEVKSIPNWTHGNTQIKNWSDRWDVTQNSLLGLYDWNTQNTQVQSYLKRFLDRALNDGADGFRFDAAKHIELPDDGSYGSQFWPNITNTXAEFQYGEILQDSASRDAAYANYMDVTASNYGHSIRSALKNRNLGVSNISQYAXEVSADKLVTWVESHDTYANDDEESTWMSDDDIRLGWAVIASRSGSTPLFFSRPEGGGNGVRFPGKSQIGDRGSALFEDQAITAVNRFHNVMAGLPEELSNPNGNNQIFMNQRGSHGVVLANAGSSSVSINTATKLPDGRYDNKAGAGSFQVNDGKLTGTINARSVAVLYPDDIAKAPHVFLENYKTGVTHSFNDQLTITLRADANTTKAVYQINNGPETAFKDGDQFTIGKGDPFGKTYTIMLKGTNSDGVTRTEKYSFVKRDPASAKTIGYQNPNHWSQVNAYIYKHDGSRVIELTGSWPGKPMTKNADGIYTLTLPADTDTTNAKVIFNNGSAQVPGQNQPGFDYVLNGLYNDSGLSGSLPHDYKDDDDK

SEQ ID NO: 45008 - protein, 635 aa, Artificial Sequence
  Description of Artificial Sequence: Synthetic polypeptide
ETANKSNELTAPSIKSGTILHAWNWSFNTLKHNMKDIHDAGYTAIQTSPINQVKEGNQGDKSMSNWYWLYQPTSYQIGNRYLGTEQEFKEMCAAAEEYGIKVIVDAVINHTTSDLLGVLSNEVKSIPNWTHGNTQIKNWSDRWDVTQNSLLGLYDWNTQNTQVQSYLKRFLDRALNDGADGFRFDAAKHIELPDDGSYGSQFWPNITNTSAEFQYGEILQDSASRDAAYANYMDVTASNYGHSIRSALKNRNLGVSNISHYASDVSADKLVTWVESHDTYANDDEESTWMSDDDIRLGWAVIASRSGSTPLFFSRPEGGGNGVRFPGKSQIGDRGSALFEDQAITAVNRFHNVMAGQPEELSNPNGNNQIFMNQRGSHGVVLANAGSSSVSINTATKLPDGRYDNKAGAGSFQVNDGKLTGTINARSVAVLYPDDIAKAPHVFLENYKTGVTHSFNDQLTITLRADANTTKAVYQINNGPETAFKDGDQFTIGKGDPFGKTYTIMLKGTNSDGVTRTEKYSFVKRDPASAKTIGYQNPNHWSQVNAYIYKHDGSRVIELTGSWPGKPMTKNADGIYTLTLPADTDTTNAKVIFNNGSAQVPGQNQPGFDYVLNGLYNDSGLSGSLPHDYKDDDDK

SEQ ID NO: 45009 - protein, 635 aa, Artificial Sequence
  Description of Artificial Sequence: Synthetic polypeptide
  MOD_RES (6)..(6): Any amino acid
  MOD_RES (20)..(20): Any amino acid
ETANKXNELTAPSIKSGTIXHAWNWSFNTLKHNMKDIHDAGYTAIQTSPINQVKEGNQGDKSMSNWYWLYQPTSYQIGNRYLGTEQEFKEMCAAAEEYGIKVIVDAVINHTTSDLVGVLSNEVKSIPNWTHGNTQIKNWSDRWDVTQNSLLGLYDWNTQNTQVQSYLKRFLDRALNDGADGFRFDAAKHIELPDDGSYGSQFWPNITRVVMEFQYGEILQDSASRDAAYANYMDVTASNYGHSIRSALKNRNLGVSNIVMYILRVSADKLVTWVESHDTYANDDEESTWMSDDDIRLGWAVIASRSGSTPLFFSRPEGGGNGVRFPGKSQIGDRGSALFEDQAITAVNRFHNVMAGLPKRLSNPNGNNQIFMNQRGSHGVVLANAGSSSVSINTATKLPDGRYDNKAGAGSFQVNDGKLTGTINARSVAVLYPDDIAKAPHVFLENYKTGVTHSFNDQLTITLRADANTTKAVYQINNGPETAFKDGDQFTIGKGDPFGKTYTIMLKGTNSDGVTRTEKYSFVKRDPASAKTIGYQNPNHWSQVNAYIYKHDGSRVIELTGSWPGKPMTKNADGIYTLTLPADTDTTNAKVIFNNGSAQVPGQNQPGFDYVLNGLYNDSGLSGSLPHDYKDDDDK

SEQ ID NO: 45010 - protein, 635 aa, Artificial Sequence
  Description of Artificial Sequence: Synthetic polypeptide
ETANKSNELTAPSIKSGTILHAWNWSFNTLKHNMKDIHDAGYTAIQTSPINQVKEGNQGDKSMSNWYWLYQPTSYQIGNRYLGTEQEFKEMCAAAEEYGIKVIVDAVINHTTSDVIGMVSNEVKSIPNWTHGNTQIKNWSDRWDVTQNSLLGLYDWNTQNTQVQSYLKRFLDRALNDGADGFRFDAAKHIELPDDGSYGSQFWPNITRLVMEFQYGEILQDSASRDAAYANYMDVTASNYGHSIRSALKNRNLGVSNIMRYLLKVSADKLVTWVESHDTYANDDEESTWMSDDDIRLGWAVIASRSGSTPLFFSRPEGGGNGVRFPGKSQIGDRGSALFEDQAITAVNRFHNVMAGIPKRLSNPNGNNQIFMNQRGSHGVVLANAGSSSVSINTATKLPDGRYDNKAGAGSFQVNDGKLTGTINARSVAVLYPDDIAKAPHVFLENYKTGVTHSFNDQLTITLRADANTTKAVYQINNGPETAFKDGDQFTIGKGDPFGKTYTIMLKGTNSDGVTRTEKYSFVKRDPASAKTIGYQNPNHWSQVNAYIYKHDGSRVIELTGSWPGKPMTKNADGIYTLTLPADTDTTNAKVIFNNGSAQVPGQNQPGFDYVLNGLYNDSGLSGSLPHDYKDDDDK

SEQ ID NO: 45011 - protein, 635 aa, Artificial Sequence
  Description of Artificial Sequence: Synthetic polypeptide
ETANKSNELTAPSIKSGTILHAWNWSFNTLKHNMKDIHDAGYTAIQTSPINQVKEGNQGDKSMSNWYWLYQPTSYQIGNRYLGTEQEFKEMCAAAEEYGIKVIVDAVINHTTSDLLGVLSNEVKSIPNWTHGNTQIKNWSDRWDVTQNSLLGLYDWNTQNTQVQSYLKRFLDRALNDGADGFRFDAAKHIELPDDGSYGSQFWPNITTFLTEFQYGEILQDSASRDAAYANYMDVTASNYGHSIRSALKNRNLGVSNIIRYLLRVSADKLVTWVESHDTYANDDEESTWMSDDDIRLGWAVIASRSGSTPLFFSRPEGGGNGVRFPGKSQIGDRGSALFEDQAITAVNRFHNVMAGLPTKLSNPNGNNQIFMNQRGSHGVVLANAGSSSVSINTATKLPDGRYDNKAGAGSFQVNDGKLTGTINARSVAVLYPDDIAKAPHVFLENYKTGVTHSFNDQLTITLRADANTTKAVYQINNGPETAFKDGDQFTIGKGDPFGKTYTIMLKGTNSDGVTRTEKYSFVKRDPASAKTIGYQNPNHWSQVNAYIYKHDGSRVIELTGSWPGKPMTKNADGIYTLTLPADTDTTNAKVIFNNGSAQVPGQNQPGFDYVLNGLYNDSGLSGSLPHDYKDDDDK

SEQ ID NO: 45012 - protein, 634 aa, Artificial Sequence
  Description of Artificial Sequence: Synthetic polypeptide
  MOD_RES (95)..(95): Any amino acid
ETANKSNELTAPSIKSGTILHAWNWSFNTLKHNMKDIHDAGYTAIQTSPINQVKEGNQGDKSMSNWYWLYQPTSYQIGNRYLGTEQEFKEMCAAXEEYGIKVIVDAVINHTTSDLFGVVSNEVKSIPNWTHGNTQIKNWCDRWDVTQNSLLGVYDWNTQNTQAQSYLKRFLDRALNDGADGFRFDAAKHIELPDDGSYGSQFWPNITGDNEFQYGEILQDSASRDAAYANYMDVTASNYGHSIRSALKNRNLGVSNIVKYLVRVSADKLVTWVESHDTYANDDEESTWMSDDDIRLGWAVIASRSGSTPLFFSRPEGGGNGVRFPGKSQIGDRGSALFEDQAITAVNRFHNVMAGFPKILSNPNGNNQIFMNQRGSHGVVLANAGSSSVSINTATKLPDGRYDNKAGAGSFQVNDGKLTGTINARSVAVLYPDDIAKAPHVFLENYKTGVTHSFNDQLTITLRADANTTKAVYQINNGPETAFKDGDQFTIGKGDPFGKTYTIMLKGTNSDGVTRTEKYSFVKRDPASAKTIGYQNPNHWSQVNAYIYKHDGSRVIELTGSWPGKPMTKNADGIYTLTLPADTDTTNAKVIFNNGSAQVPGQNQPGFDYVLNGLYNDSGLSGSLPHDYKDDDDK

SEQ ID NO: 45013 - protein, 635 aa, Artificial Sequence
  Description of Artificial Sequence: Synthetic polypeptide
ETANKSNELTAPSIKSGTILHAWNWSFNTLKHNMKDIHDAGYTAIQTSPINQVKEGNQGDKSMSNWYWLYQPTSYQIGNRYLGTEQEFKEMCAAAEEYGIKVIVDAVINHTTSDVLGVVSNEVKSIPNWTHGNTQIKNWSDRWDVTQNSLLGLYDWNTQNTQVQSYLKRFLDRALNDGADGFRFDAAKHIELPDDGSYGSQFWPNITNTSAEFQYGEILQDSASRDAAYANYMDVTASNYGHSIRSALKNRNLGVSNISHYASDVSADKLVTWVESHDTYANDDEESTWMSDDDIRLGWAVIASRSGSTPLFFSRPEGGGNGVRFPGKSQIGDRGSALFEDQAITAVNRFHNVMAGQPEELSNPNGNNQIFMNQRGSHGVVLANAGSSSVSINTATKLPDGRYDNKAGAGSFQVNDGKLTGTINARSVAVLYPDDIAKAPHVFLENYKTGVTHSFNDQLTITLRADANTTKAVYQINNGPETAFKDGDQFTIGKGDPFGKTYTIMLKGTNSDGVTRTEKYSFVKRDPASAKTIGYQNPNHWSQVNAYIYKHDGSRVIELTGSWPGKPMTKNADGIYTLTLPADTDTTNAKVIFNNGSAQVPGQNQPGFDYVLNGLYNDSGLSGSLPHDYKDDDDK

SEQ ID NO: 45014 - protein, 635 aa, Artificial Sequence
  Description of Artificial Sequence: Synthetic polypeptide
ETANKSNELTAPSIKSGTILHAWNWSFNTLKHNMKDIHDAGYTAIQTSPINQVKEGNQGDKSMSNWYWLYQPTSYQIGNRYLGTEQEFKEMCAAAEEYGIKVIVDAVINHTTSDLLGLVSNEVKSIPNWTHGNTQIKNWSDRWDVTQNSLLGLYDWNTQNTQVQSYLKRFLDRALNDGADGFRFDAAKHIELPDDGSYGSQFWPNITTVFREFQYGEILQDSASRDAAYANYMDVTASNYGHSIRSALKNRNLGVSNILRYLVKVSADKLVTWVESHDTYANDDEESTWMSDDDIRLGWAVIASRSGSTPLFFSRPEGGGNGVRFPGKSQIGDRGSALFEDQAITAVNRFHNVMAGIPIILSNPNGNNQIFMNQRGSHGVVLANAGSSSVSINTATKLPDGRYDNKAGAGSFQVNDGKLTGTINARSVAVLYPDDIAKAPHVFLENYKTGVTHSFNDQLTITLRADANTTKAVYQINNGPETAFKDGDQFTIGKGDPFGKTYTIMLKGTNSDGVTRTEKYSFVKRDPASAKTIGYQNPNHWSQVNAYIYKHDGSRVIELTGSWPGKPMTKNADGIYTLTLPADTDTTNAKVIFNNGSAQVPGQNQPGFDYVLNGLYNDSGLSGSLPHDYKDDDDK

SEQ ID NO: 45015 - protein, 592 aa, Artificial Sequence
  Description of Artificial Sequence: Synthetic polypeptide
ETANKSNELTAPSIKSGTILHAWNWSFNTLKHNMKDIHDAGYTAIQTSPINQVKEGNQGDKSMSNWYWLYQPTSYQIGNRYLGTEQEFKEMCAAAEEYGIKVIVDAVINHTTSDYAAISNEVKSIPNWTHGNTQIKNWCDRWDVTQNSLLGLYDWNTQNTQVQSYLKRLLDRALNDGADGFRFDAAKHIELPDDGSYGSQFWPNITNTFAEFQYGEILQNRNLGVSNISHYASDVSADKLVTWVEWMSDDDIRLGWAVIASRSGSTPLFFSRPEGGGNGVRFPGKSQIGDRGSALFEDQAITAVNRFHNVMAGQPEELSNPNGNNQIFMNQRGSHGVVLANAGSSSVSINTATKLPDGRYDNKAGAGSFQVNDGKLTGTINARSVAVLYPDDIAKAPHVFLENYKTGVTHSFNDQLTITLRADANTTKAVYQINNGPETAFKDGDQFTIGKGDPFGKTYTIMLKGTNSDGVTRTEKYSFVKRDPASAKTIGYQNPNHWSQVNAYIYKHDGSRVIELTGSWPGKPMTKNADGIYTLTLPADTDTTNAKVIFNNGSAQVPGQNQPGFDYVLNGLYNDSGLSGSLPHDYKDDDDK

SEQ ID NO: 45016 - protein, 606 aa, Artificial Sequence
  Description of Artificial Sequence: Synthetic polypeptide
  MOD_RES (210)..(210): Any amino acid
  MOD_RES (330)..(330): Any amino acid
ETANKSNELTAPSIKSGTILHAWNWSFNTLKHNMKDIHDAGYTAIQTSPINQVKEGNQGDKSMSNWYWLYQPTSYQIGNRYLGTEQEFKEMCAAAEEYGIKVIVDAVINHTTSDVIGLLSNEVKSIPNWTHGNTQIKNWSDRWDVTQNSLLGLYDWNTQNTQVQSYLKRFLDRALNDGADGFRFDAAKHIELPDDGSYGSQFWPNITNTXREFQYGEILQNRNLGVSNISLSAFGVSADKLVTWVESHDTYANDDEESTWMSDDDIRLGWAVIASRSGSTPLFFSRPEGGGNGVRFPGKSQIGDRGSALFEDQAITAVNRFHNVMAGLPXELSNPNGNNQIFMNQRGSHGVVLANAGSSSVSINTATKLPDGRYDNKAGAGSFQVNDGKLTGTINARSVAVLYPDDIAKAPHVFLENYKTGVTHSFNDQLTITLRADANTTKAVYQINNGPETAFKDGDQFTIGKGDPFGKTYTIMLKGTNSDGVTRTEKYSFVKRDPASAKTIGYQNPNHWSQVNAYIYKHDGSRVIELTGSWPGKPMTKNADGIYTLTLPADTDTTNAKVIFNNGSAQVPGQNQPGFDYVLNGLYNDSGLSGSLPHDYKDDDDK

SEQ ID NO: 45017 - protein, 635 aa, Artificial Sequence
  Description of Artificial Sequence: Synthetic polypeptide
ETANKSNELTAPSIKSGTILHAWNWSFNTLKHNMKDIHDAGYTAIQTSPINQVKEGNQGDKSMSNWYWLYQPTSYQIGNRYLGTEQEFKEMCAAAEEYGIKVIVDAVINHTTSDVLGVLSNEVKSIPNWTHGNTQIKNWSDRWDVTQNSLLGLYDWNTQNTQVQSYLKRFLDRALNDGADGFRFDAAKHIELPDDGSYGSQFWPNITKMIMEFQYGEILQDSASRDAAYANYMDVTASNYGHSIRSALKNRNLGVSNISHYASDVSADKLVTWVESHDTYANDDEESTWMSDDDIRLGWAVIASRSGSTPLFFSRPEGGGNGVRFPGKSQIGDRGSALFEDQAITAVNRFHNVMAGVPMMLSNPNGNNQIFMNQRGSHGVVLANAGSSSVSINTATKLPDGRYDNKAGAGSFQVNDGKLTGTINARSVAVLYPDDIAKAPHVFLENYKTGVTHSFNDQLTITLRADANTTKAVYQINNGPETAFKDGDQFTIGKGDPFGKTYTIMLKGTNSDGVTRTEKYSFVKRDPASAKTIGYQNPNHWSQVNAYIYKHDGSRVIELTGSWPGKPMTKNADGIYTLTLPADTDTTNAKVIFNNGSAQVPGQNQPGFDYVLNGLYNDSGLSGSLPHDYKDDDDK

SEQ ID NO: 45018 - protein, 635 aa, Artificial Sequence
  Description of Artificial Sequence: Synthetic polypeptide
ETANKSNELTAPSIKSGTILHAWNWSFNTLKHNMKDIHDAGYTAIQTSPINQVKEGNQGDKSMSNWYWLYQPTSYQIGNRYLGTEQEFKEMCAAAEEYGIKVIVDAVINHTTSDLFGLVSNEVKSIPNWTHGNTQIKNWSDRWDVTQNSLLGLYDWNTQNTQVQSYLKRFLDRALNDGADGFRFDAAKHIELPDDGSYGSQFWPNITNTSAEFQYGEILQDSASRDAAYANYMDVTASNYGHSIRSALKNRNLGVSNISHYASDVSADKLVTWVESHDTYANDDEESTWMSDDDIRLGWAVIASRSGSTPLFFSRPEGGGNGVRFPGKSQIGDRGSALFEDQAITAVNRFHNVMAGQPEELSNPNGNNQIFMNQRGSHGVVLANAGSSSVSINTATKLPDGRYDNKAGAGSFQVNDGKLTGTINARSVAVLYPDDIAKAPHVFLENYKTGVTHSFNDQLTITLRADANTTKAVYQINNGPETAFKDGDQFTIGKGDPFGKTYTIMLKGTNSDGVTRTEKYSFVKRDPASAKTIGYQNPNHWSQVNAYIYKHDGSRVIELTGSWPGKPMTKNADGIYTLTLPADTDTTNAKVIFNNGSAQVPGQNQPGFDYVLNGLYNDSGLSGSLPHDYKDDDDK

SEQ ID NO: 45019 - protein, 635 aa, Artificial Sequence
  Description of Artificial Sequence: Synthetic polypeptide
ETANKSNELTAPSIKSGTILHAWNWSFNTLKHNMKDIHDAGYTAIQTSPINQVKEGNQGDKSMSNWYWLYQPTSYQIGNRYLGTEQEFKEMCAAAEEYGIKVIVDAVINHTTSDLIGVFSNEVKSIPNWTHGNTQIKNWSDRWDVTQNSLLGLYDWNTQNTQVQSYLKRFLDRALNDGADGFRFDAAKHIELPDDGSYGSQFWPNITRVLREFQYGEILQDSASRDAAYANYMDVTASNYGHSIRSALKNRNLGVSNIFIYVITVSADKLVTWVESHDTYANDDEESTWMSDDDIRLGWAVIASRSGSTPLFFSRPEGGGNGVRFPGKSQIGDRGSALFEDQAITAVNRFHNVMAGVPMKLSNPNGNNQIFMNQRGSHGVVLANAGSSSVSINTATKLPDGRYDNKAGAGSFQVNDGKLTGTINARSVAVLYPDDIAKAPHVFLENYKTGVTHSFNDQLTITLRADANTTKAVYQINNGPETAFKDGDQFTIGKGDPFGKTYTIMLKGTNSDGVTRTEKYSFVKRDPASAKTIGYQNPNHWSQVNAYIYKHDGSRVIELTGSWPGKPMTKNADGIYTLTLPADTDTTNAKVIFNNGSAQVPGQNQPGFDYVLNGLYNDSGLSGSLPHDYKDDDDK

SEQ ID NO: 45020 - protein, 635 aa, Artificial Sequence
  Description of Artificial Sequence: Synthetic polypeptide
ETANKSNELTAPSIKSGTILHAWNWSFNTLKHNMKDIHDAGYTAIQTSPINQVKEGNQGDKSMSNWYWLYQPTSYQIGNRYLGTEQEFKEMCAAAEEYGIKVIVDAVINHTTSDLFGMVSNEVKSIPNWTHGNTQIKNWFDRWDVTQNSLLGLYDWNTQNTQVQSYLKRFLDRALNDGADGFRFDAAKHIELPDDGSYGSQFWPNITIVITEFQYGEILQDSASRDAAYANYMDVTASNYGHSIRSALKNRNLGVSNILRYVLRVSADKLVTWVESHDTYANDDEESTWMSDDDIRLGWAVIASRSGSTPLFFSRPEGGGNGVRFPGKSQIGDRGSALFEDQAITAVNRFHNVMAGLPMKLSNPNGNNQIFMNQRGSHGVVLANAGSSSVSINTATKLPDGRYDNKAGAGSFQVNDGKLTGTINARSVAVLYPDDIAKAPHVFLENYKTGVTHSFNDQLTITLRADANTTKAVYQINNGPETAFKDGDQFTIGKGDPFGKTYTIMLKGTNSDGVTRTEKYSFVKRDPASAKTIGYQNPNHWSQVNAYIYKHDGSRVIELTGSWPGKPMTKNADGIYTLTLPADTDTTNAKVIFNNGSAQVPGQNQPGFDYVLNGLYNDSGLSGSLPHDYKDDDDK

SEQ ID NO: 45021 - protein, 635 aa, Artificial Sequence
  Description of Artificial Sequence: Synthetic polypeptide
ETANKSNELTAPSIKSGTILHAWNWSFNTLKHNMKDIHDAGYTAIQTSPINQVKEGNQGDKSMSNWYWLYQPTSYQIGNRYLGTEQEFKEMCAAAEEYGIKVIVDAVINHTTSDVLGLLSNEVKSIPNWTHGNTQIKNWSDRWDVTQNSLLGLYDWNTQNTQVQSYLKRFLDRALNDGADGFRFDAAKHIELPDDGSYGSQFWPNITIIMREFQYGEILQDSASRDAAYANYMDVTASNYGHSIRSALKNRNLGVSNILRYMMTVSADKLVTWVESHDTYANDDEESTWMSDDDIRLGWAVIASRSGSTPLFFSRPEGGGNGVRFPGKSQIGDRGSALFEDQAITAVNRFHNVMAGVPKTLSNPNGNNQIFMNQRGSHGVVLANAGSSSVSINTATKLPDGRYDNKAGAGSFQVNDGKLTGTINARSVAVLYPDDIAKAPHVFLENYKTGVTHSFNDQLTITLRADANTTKAVYQINNGPETAFKDGDQFTIGKGDPFGKTYTIMLKGTNSDGVTRTEKYSFVKRDPASAKTIGYQNPNHWSQVNAYIYKHDGSRVIELTGSWPGKPMTKNADGIYTLTLPADTDTTNAKVIFNNGSAQVPGQNQPGFDYVLNGLYNDSGLSGSLPHDYKDDDDK

SEQ ID NO: 45022 - protein, 635 aa, Artificial Sequence
  Description of Artificial Sequence: Synthetic polypeptide
ETANKSNELTAPSIKSGTILHAWNWSFNTLKHNMKDIHDAGYTAIQTSPINQVKEGNQGDKSMSNWYWLYQPTSYQIGNRYLGTEQEFKEMCAAAEEYGIKVIVDAVINHTTSDIVGFVSNEVKSIPNWTHGNTQIKNWSDRWDVTQNSLLGLYDWNTQNTQVQSYLKRFLDRALNDGADGFRFDAAKHIELPDDGSYGSQFWPNITKVLMEFQYGEILQDSASRDAAYANYMDVTASNYGHSIRSALKNRNLGVSNISHYASDVSADKLVTWVESHDTYANDDEESTWMSDDDIRLGWAVIASRSGSTPLFFSRPEGGGNGVRFPGKSQIGDRGSALFEDQAITAVNRFHNVMAGQPEELSNPNGNNQIFMNQRGSHGVVLANAGSSSVSINTATKLPDGRYDNKAGAGSFQVNDGKLTGTINARSVAVLYPDDIAKAPHVFLENYKTGVTHSFNDQLTITLRADANTTKAVYQINNGPETAFKDGDQFTIGKGDPFGKTYTIMLKGTNSDGVTRTEKYSFVKRDPASAKTIGYQNPNHWSQVNAYIYKHDGSRVIELTGSWPGKPMTKNADGIYTLTLPADTDTTNAKVIFNNGSAQVPGQNQPGFDYVLNGLYNDSGLSGSLPHDYKDDDDK

SEQ ID NO: 45023 - protein, 635 aa, Artificial Sequence
  Description of Artificial Sequence: Synthetic polypeptide
  MOD_RES (20)..(20): Any amino acid
ETANKSNELTAPSIKSGTIXHAWNWSFNTLKHNMKDIHDAGYTAIQTSPINQVKEGNQGDKSMSNWYWLYQPTSYQIGNRYLGTEQEFKEMCAAAEEYGIKVIVDAVINHTTSDVIGFFSNEVKSIPNWTHGNTQIKNWSDRWDVTQNSLLGLYDWNTQNTQVQSYLKRFLDRALNDGADGFRFDAAKHIELPDDGSYGSQFWPNITKVLREFQYGEILQDSASRDAAYANYMDVTASNYGHSIRSALKNRNLGVSNIMRYIVRVSADKLVTWVESHDTYANDDEESTWMSDDDIRLGWAVIASRSGSTPLFFSRPEGGGNGVRFPGKSQIGDRGSALFEDQAITAVNRFHNVMAGLPRRLSNPNGNNQIFMNQRGSHGVVLANAGSSSVSINTATKLPDGRYDNKAGAGSFQVNDGKLTGTINARSVAVLYPDDIAKAPHVFLENYKTGVTHSFNDQLTITLRADANTTKAVYQINNGPETAFKDGDQFTIGKGDPFGKTYTIMLKGTNSDGVTRTEKYSFVKRDPASAKTIGYQNPNHWSQVNAYIYKHDGSRVIELTGSWPGKPMTKNADGIYTLTLPADTDTTNAKVIFNNGSAQVPGQNQPGFDYVLNGLYNDSGLSGSLPHDYKDDDDK

SEQ ID NO: 45024 - protein, 635 aa, Artificial Sequence
  Description of Artificial Sequence: Synthetic polypeptide
ETANKSNELTAPSIKSGTILHAWNWSFNTLKHNMKDIHDAGYTAIQTSPINQVKEGNQGDKSMSNWYWLYQPTSYQIGNRYLGTEQEFKEMCAAAEEYGIKVIVDAVINHTTSDVLGVVSNEVKSIPNWTHGNTQIKNWSDRWDVTQNSLLGLYDWNTQNTQVQSYLKRFLDRALNDGADGFRFDAAKHIELPDDGSYGSQFWPNITTVVMEFQYGEILQDSASRDAAYANYMDVTASNYGHSIRSALKNRNLGVSNILRYVVRVSADKLVTWVESHDTYANDDEESTWMSDDDIRLGWAVIASRSGSTPLFFSRPEGGGNGVRFPGKSQIGDRGSALFEDQAITAVNRFHNVMAGVPTKLSNPNGNNQIFMNQRGSHGVVLANAGSSSVSINTATKLPDGRYDNKAGAGSFQVNDGKLTGTINARSVAVLYPDDIAKAPHVFLENYKTGVTHSFNDQLTITLRADANTTKAVYQINNGPETAFKDGDQFTIGKGDPFGKTYTIMLKGTNSDGVTRTEKYSFVKRDPASAKTIGYQNPNHWSQVNAYIYKHDGSRVIELTGSWPGKPMTKNADGIYTLTLPADTDTTNAKVIFNNGSAQVPGQNQPGFDYVLNGLYNDSGLSGSLPHDYKDDDDK

SEQ ID NO: 45025 - protein, 635 aa, Artificial Sequence
  Description of Artificial Sequence: Synthetic polypeptide
ETANKSNELTAPSIKSGTILHAWNWSFNTLKHNMKDIHDAGYTAIQTSPINQVKEGNQGDKSMSNWYWLYQPTSYQIGNRYLGTEQEFKEMCAAAEEYGIKVIVDAVINHTTSDTTGTTSNEVKSIPNWTHGNTQIKNWSDRWDVTQNSLLGLYDWNTQNTQVQSYLKRFLDRALNDGADGFRFDAAKHIELPDDGSYGSQFWPNITKTTGEFQYGEILQDSASRDAAYANYMDVTASNYGHSIRSALKNRNLGVSNITHYTTDVSADKLVTWVESHDTYANDDEESTWMSDDDIRLGWAVIASRSGSTPLFFSRPEGGGNGVRFPGKSQIGDRGSALFEDQAITAVNRFHNVMAGTPEELSNPNGNNQIFMNQRGSHGVVLANAGSSSVSINTATKLPDGRYDNKAGAGSFQVNDGKLTGTINARSVAVLYPDDIAKAPHVFLENYKTGVTHSFNDQLTITLRADANTTKAVYQINNGPETAFKDGDQFTIGKGDPFGKTYTIMLKGTNSDGVTRTEKYSFVKRDPASAKTIGYQNPNHWSQVNAYIYKHDGSRVIELTGSWPGKPMTKNADGIYTLTLPADTDTTNAKVIFNNGSAQVPGQNQPGFDYVLNGLYNDSGLSGSLPHDYKDDDDK

SEQ ID NO: 45026 - protein, 635 aa, Artificial Sequence
  Description of Artificial Sequence: Synthetic polypeptide
ETANKSNELTAPSIKSGTILHAWNWSFNTLKHNMKDIHDAGYTAIQTSPINQVKEGNQGDKSMSNWYWLYQPTSYQIGNRYLGTEQEFKEMCAAAEEYGIKVIVDAVINHTTSDMMGMMSNEVKSIPNWTHGNTQIKNWSDRWDVTQNSLLGLYDWNTQNTQVQSYLKRFLDRALNDGADGFRFDAAKHIELPDDGSYGSQFWPNITKMMGEFQYGEILQDSASRDAAYANYMDVTASNYGHSIRSALKNRNLGVSNIMHYMMDVSADKLVTWVESHDTYANDDEESTWMSDDDIRLGWAVIASRSGSTPLFFSRPEGGGNGVRFPGKSQIGDRGSALFEDQAITAVNRFHNVMAGMPEELSNPNGNNQIFMNQRGSHGVVLANAGSSSVSINTATKLPDGRYDNKAGAGSFQVNDGKLTGTINARSVAVLYPDDIAKAPHVFLENYKTGVTHSFNDQLTITLRADANTTKAVYQINNGPETAFKDGDQFTIGKGDPFGKTYTIMLKGTNSDGVTRTEKYSFVKRDPASAKTIGYQNPNHWSQVNAYIYKHDGSRVIELTGSWPGKPMTKNADGIYTLTLPADTDTTNAKVIFNNGSAQVPGQNQPGFDYVLNGLYNDSGLSGSLPHDYKDDDDK

SEQ ID NO: 45027 - protein, 635 aa, Artificial Sequence
  Description of Artificial Sequence: Synthetic polypeptide
ETANKSNELTAPSIKSGTILHAWNWSFNTLKHNMKDIHDAGYTAIQTSPINQVKEGNQGDKSMSNWYWLYQPTSYQIGNRYLGTEQEFKEMCAAAEEYGIKVIVDAVINHTTSDYKKGKKNEVKSIPNWTHGNTQIKNWSDRWDVTQNSLLGLYDWNTQNTQVQSYLKRFLDRALNDGADGFRFDAAKHIELPDDGSYGSQFWPNITKKGAEFQYGEILQDSASRDAAYANYMDVTASNYGHSIRSALKNRNLGVSNISKYKAKVSADKLVTWVESHDTYANDDEESTWMSDDDIRLGWAVIASRSGSTPLFFSRPEGGGNGVRFPGKSQIGDRGSALFEDQAITAVNRFHNVMAGKPEELSNPNGNNQIFMNQRGSHGVVLANAGSSSVSINTATKLPDGRYDNKAGAGSFQVNDGKLTGTINARSVAVLYPDDIAKAPHVFLENYKTGVTHSFNDQLTITLRADANTTKAVYQINNGPETAFKDGDQFTIGKGDPFGKTYTIMLKGTNSDGVTRTEKYSFVKRDPASAKTIGYQNPNHWSQVNAYIYKHDGSRVIELTGSWPGKPMTKNADGIYTLTLPADTDTTNAKVIFNNGSAQVPGQNQPGFDYVLNGLYNDSGLSGSLPHDYKDDDDK

SEQ ID NO: 45028 - protein, 635 aa, Artificial Sequence
  Description of Artificial Sequence: Synthetic polypeptide
ETANKSNELTAPSIKSGTILHAWNWSFNTLKHNMKDIHDAGYTAIQTSPINQVKEGNQGDKSMSNWYWLYQPTSYQIGNRYLGTEQEFKEMCAAAEEYGIKVIVDAVINHTTSDYHHGHHNEVKSIPNWTHGNTQIKNWSDRWDVTQNSLLGLYDWNTQNTQVQSYLKRFLDRALNDGADGFRFDAAKHIELPDDGSYGSQFWPNITHHGAEFQYGEILQDSASRDAAYANYMDVTASNYGHSIRSALKNRNLGVSNISHYHAHVSADKLVTWVESHDTYANDDEESTWMSDDDIRLGWAVIASRSGSTPLFFSRPEGGGNGVRFPGKSQIGDRGSALFEDQAITAVNRFHNVMAGHPEELSNPNGNNQIFMNQRGSHGVVLANAGSSSVSINTATKLPDGRYDNKAGAGSFQVNDGKLTGTINARSVAVLYPDDIAKAPHVFLENYKTGVTHSFNDQLTITLRADANTTKAVYQINNGPETAFKDGDQFTIGKGDPFGKTYTIMLKGTNSDGVTRTEKYSFVKRDPASAKTIGYQNPNHWSQVNAYIYKHDGSRVIELTGSWPGKPMTKNADGIYTLTLPADTDTTNAKVIFNNGSAQVPGQNQPGFDYVLNGLYNDSGLSGSLPHDYKDDDDK

SEQ ID NO: 45029 - protein, 638 aa, Artificial Sequence
  Description of Artificial Sequence: Synthetic polypeptide
ATLDSWLSNEATVARTAILNNIGADGAWVSGADSGIVVASPSTDNPDYFYTWTRDSGLVLKTLVDLFRNGDTSLLSTIENYISAQAIVQGISNPSGDLSSGAGLGEPKFNVDETAYTGSWGRPQRDGPALRATAMIGFGQWLLDNGYTSTATDIVWPLVRNDLSYVAQYWNQTGYDLWEEVNGSSFFTIAVQHRALVEGSAFATAVGSSCSWCDSQAPEILCYLQSFWTGSFILANFDSSRSGKDANTLLGSIHTFDPEAACDDSTFQPCSPRALANHKEVVDSFRSIYTLNDGLSDSEAVAVGRYPEDTYYNGNPWFLCTLAAAEQLYDALYQWDKQGSLEVTDVSLDFFKALYSDAATGTYSSSSSTYSSIVDAVKTFADGFVSIVETHAASNGSMSEQYDKSDGEQLSARDLTWSYAALLTANNRRNSVVPASWGETSASSVPGTCAATSAIGTYSSVTVTSWPSIVATGGTTTTATPTGSGSVTSTSKTTATASKTSTSTSSTSCTTPTAVAVTFDLTATTTYGENIYLVGSISQLGDWETSDGIALSADKYTSSDPLWYVTVTLPAGESFEYKFIRIESDDSVEWESDPNREYTVPQACGTSTATVTDTWRDYKDHDGDYKDHDIDYKDDDDK

SEQ ID NO: 45030 - protein, 576 aa, Artificial Sequence
  Description of Artificial Sequence: Synthetic polypeptide
ATLDSWLSNEATVARTAILNNIGADGAWVSGADSGIVVASPSTDNPDYFYTWTRDSGLVLKTLVDLFRNGDTSLLSTIENYISAQAIVQGISNPSGRLIIGRGLGEPKFNVDETAYTGSWGRPQRDGPALRATAMIGFGQWLLDNGYTSTATDIVWPLVRNDLSFWTGSFILANFDSSRSGKDANTLLGSIHTFDPEAACDDSTFQPCSPRALANHKEVVDSFRSIYTLNDGLKMVKAVAVGRYPEDTYYNGNPWFLCTLAAAEQLYDALYQWDKQGSLEVTDVSLDFFKALYSDAATGTYSSSSSTYSSIVDAVKTFADGFVSIVETHAASNGSMSEQYDKMRGLLLSARDLTWSYAALLTANNRRNSVVPASWGETSASSVPGTCVLTSIIGTYSSVTVTSWPSIVATGGTTTTATPTGSGSVTSTSKTTATASKTSTSTSSTSCTTPTAVAVTFDLTATTTYGENIYLVGSISQLGDWETSDGIALSADKYTSSDPLWYVTVTLPAGESFEYKFIRIESDDSVEWESDPNREYTVPQACGTSTATVTDTWRDYKDHDGDYKDHDIDYKDDDDK

SEQ ID NO: 45031 - protein, 638 aa, Artificial Sequence
  Description of Artificial Sequence: Synthetic polypeptide
ATLDSWLSNEATVARTAILNNIGADGAWVSGADSGIVVASPSTDNPDYFYTWTRDSGLVLKTLVDLFRNGDTSLLSTIENYISAQAIVQGISNPSGTLRTGMGLGEPKFNVDETAYTGSWGRPQRDGPALRATAMIGFGQWLLDNGYTSTATDIVWPLVRNDLSYVAQYWNQTGYDLWEEVNGSSFFTIAVQHRALVEGSAFATAVGSSCSWCDSQAPEILCYLQSFWTGSFILANFDSSRSGKDANTLLGSIHTFDPEAACDDSTFQPCSPRALANHKEVVDSFRSIYTLNDGLTMLIAVAVGRYPEDTYYNGNPWFLCTLAAAEQLYDALYQWDKQGSLEVTDVSLDFFKALYSDAATGTYSSSSSTYSSIVDAVKTFADGFVSIVETHAASNGSMSEQYDKVKGVVLSARDLTWSYAALLTANNRRNSVVPASWGETSASSVPGTCFVTSLIGTYSSVTVTSWPSIVATGGTTTTATPTGSGSVTSTSKTTATASKTSTSTSSTSCTTPTAVAVTFDLTATTTYGENIYLVGSISQLGDWETSDGIALSADKYTSSDPLWYVTVTLPAGESFEYKFIRIESDDSVEWESDPNREYTVPQACGTSTATVTDTWRDYKDHDGDYKDHDIDYKDDDDK

SEQ ID NO: 45032 - protein, 576 aa, Artificial Sequence
  Description of Artificial Sequence: Synthetic polypeptide
ATLDSWLSNEATVARTAILNNIGADGAWVSGADSGIVVASPSTDNPDYFYTWTRDSGLVLKTLVDLFRNGDTSLLSTIENYISAQAIVQGISNPSGRLIIGRGLGEPKFNVDETAYTGSWGRPQRDGPALRATAMIGFGQWLLDNGYTSTATDIVWPLVRNDLSFWTGSFILANFDSSRSGKDANTLLGSIHTFDPEAACDDSTFQPCSPRALANHKEVVDSFRSIYTLNDGLKMVKAVAVGRYPEDTYYNGNPWFLCTLAAAEQLYDALYQWDKQGSLEVTDVSLDFFKALYSDAATGTYSSSSSTYSSIVDAVKTFADGFVSIVETHAASNGSMSEQYDKVKGVVLSARDLTWSYAALLTANNRRNSVVPASWGETSASSVPGTCFVTSLIGTYSSVTVTSWPSIVATGGTTTTATPTGSGSVTSTSKTTATASKTSTSTSSTSCTTPTAVAVTFDLTATTTYGENIYLVGSISQLGDWETSDGIALSADKYTSSDPLWYVTVTLPAGESFEYKFIRIESDDSVEWESDPNREYTVPQACGTSTATVTDTWRDYKDHDGDYKDHDIDYKDDDDK

SEQ ID NO: 45033 - protein, 638 aa, Artificial Sequence
  Description of Artificial Sequence: Synthetic polypeptide
ATLDSWLSNEATVARTAILNNIGADGAWVSGADSGIVVASPSTDNPDYFYTWTRDSGLVLKTLVDLFRNGDTSLLSTIENYISAQAIVQGISNPSGMLKKGMGLGEPKFNVDETAYTGSWGRPQRDGPALRATAMIGFGQWLLDNGYTSTATDIVWPLVRNDLSYVAQYWNQTGYDLWEEVNGSSFFTIAVQHRALVEGSAFATAVGSSCSWCDSQAPEILCYLQSFWTGSFILANFDSSRSGKDANTLLGSIHTFDPEAACDDSTFQPCSPRALANHKEVVDSFRSIYTLNDGLKMMTAVAVGRYPEDTYYNGNPWFLCTLAAAEQLYDALYQWDKQGSLEVTDVSLDFFKALYSDAATGTYSSSSSTYSSIVDAVKTFADGFVSIVETHAASNGSMSEQYDKVKGIVLSARDLTWSYAALLTANNRRNSVVPASWGETSASSVPGTCLVTSFIGTYSSVTVTSWPSIVATGGTTTTATPTGSGSVTSTSKTTATASKTSTSTSSTSCTTPTAVAVTFDLTATTTYGENIYLVGSISQLGDWETSDGIALSADKYTSSDPLWYVTVTLPAGESFEYKFIRIESDDSVEWESDPNREYTVPQACGTSTATVTDTWRDYKDHDGDYKDHDIDYKDDDDK

SEQ ID NO: 45034 - protein, 638 aa, Artificial Sequence
  Description of Artificial Sequence: Synthetic polypeptide
ATLDSWLSNEATVARTAILNNIGADGAWVSGADSGIVVASPSTDNPDYFYTWTRDSGLVLKTLVDLFRNGDTSLLSTIENYISAQAIVQGISNPSGTLTTGMGLGEPKFNVDETAYTGSWGRPQRDGPALRATAMIGFGQWLLDNGYTSTATDIVWPLVRNDLSYVAQYWNQTGYDLWEEVNGSSFFTIAVQHRALVEGSAFATAVGSSCSWCDSQAPEILCYLQSFWTGSFILANFDSSRSGKDANTLLGSIHTFDPEAACDDSTFQPCSPRALANHKEVVDSFRSIYTLNDGLTKIRAVAVGRYPEDTYYNGNPWFLCTLAAAEQLYDALYQWDKQGSLEVTDVSLDFFKALYSDAATGTYSSSSSTYSSIVDAVKTFADGFVSIVETHAASNGSMSEQYDKMRGLVLSARDLTWSYAALLTANNRRNSVVPASWGETSASSVPGTCVLTSVIGTYSSVTVTSWPSIVATGGTTTTATPTGSGSVTSTSKTTATASKTSTSTSSTSCTTPTAVAVTFDLTATTTYGENIYLVGSISQLGDWETSDGIALSADKYTSSDPLWYVTVTLPAGESFEYKFIRIESDDSVEWESDPNREYTVPQACGTSTATVTDTWRDYKDHDGDYKDHDIDYKDDDDK

SEQ ID NO: 45035 - protein, 638 aa, Artificial Sequence
  Description of Artificial Sequence: Synthetic polypeptide
ATLDSWLSNEATVARTAILNNIGADGAWVSGADSGIVVASPSTDNPDYFYTWTRDSGLVLKTLVDLFRNGDTSLLSTIENYISAQAIVQGISNPSGTLRTGMGLGEPKFNVDETAYTGSWGRPQRDGPALRATAMIGFGQWLLDNGYTSTATDIVWPLVRNDLSYVAQYWNQTGYDLWEEVNGSSFFTIAVQHRALVEGSAFATAVGSSCSWCDSQAPEILCYLQSFWTGSFILANFDSSRSGKDANTLLGSIHTFDPEAACDDSTFQPCSPRALANHKEVVDSFRSIYTLNDGLTMLIAVAVGRYPEDTYYNGNPWFLCTLAAAEQLYDALYQWDKQGSLEVTDVSLDFFKALYSDAATGTYSSSSSTYSSIVDAVKTFADGFVSIVETHAASNGSMSEQYDKVRGLVLSARDLTWSYAALLTANNRRNSVVPASWGETSASSVPGTCLVTSMIGTYSSVTVTSWPSIVATGGTTTTATPTGSGSVTSTSKTTATASKTSTSTSSTSCTTPTAVAVTFDLTATTTYGENIYLVGSISQLGDWETSDGIALSADKYTSSDPLWYVTVTLPAGESFEYKFIRIESDDSVEWESDPNREYTVPQACGTSTATVTDTWRDYKDHDGDYKDHDIDYKDDDDK

SEQ ID NO: 45036 - protein, 638 aa, Artificial Sequence
  Description of Artificial Sequence: Synthetic polypeptide
ATLDSWLSNEATVARTAILNNIGADGAWVSGADSGIVVASPSTDNPDYFYTWTRDSGLVLKTLVDLFRNGDTSLLSTIENYISAQAIVQGISNPSGKLMTGTGLGEPKFNVDETAYTGSWGRPQRDGPALRATAMIGFGQWLLDNGYTSTATDIVWPLVRNDLSYVAQYWNQTGYDLWEEVNGSSFFTIAVQHRALVEGSAFATAVGSSCSWCDSQAPEILCYLQSFWTGSFILANFDSSRSGKDANTLLGSIHTFDPEAACDDSTFQPCSPRALANHKEVVDSFRSIYTLNDGLITFKAVAVGRYPEDTYYNGNPWFLCTLAAAEQLYDALYQWDKQGSLEVTDVSLDFFKALYSDAATGTYSSSSSTYSSIVDAVKTFADGFVSIVETHAASNGSMSEQYDKLTGLLLSARDLTWSYAALLTANNRRNSVVPASWGETSASSVPGTCLFTSIIGTYSSVTVTSWPSIVATGGTTTTATPTGSGSVTSTSKTTATASKTSTSTSSTSCTTPTAVAVTFDLTATTTYGENIYLVGSISQLGDWETSDGIALSADKYTSSDPLWYVTVTLPAGESFEYKFIRIESDDSVEWESDPNREYTVPQACGTSTATVTDTWRDYKDHDGDYKDHDIDYKDDDDK

SEQ ID NO: 45037 - protein, 638 aa, Artificial Sequence
  Description of Artificial Sequence: Synthetic polypeptide
ATLDSWLSNEATVARTAILNNIGADGAWVSGADSGIVVASPSTDNPDYFYTWTRDSGLVLKTLVDLFRNGDTSLLSTIENYISAQAIVQGISNPSGTLMRGKGLGEPKFNVDETAYTGSWGRPQRDGPALRATAMIGFGQWLLDNGYTSTATDIVWPLVRNDLSYVAQYWNQTGYDLWEEVNGSSFFTIAVQHRALVEGSAFATAVGSSCSWCDSQAPEILCYLQSFWTGSFILANFDSSRSGKDANTLLGSIHTFDPEAACDDSTFQPCSPRALANHKEVVDSFRSIYTLNDGLRRLRAVAVGRYPEDTYYNGNPWFLCTLAAAEQLYDALYQWDKQGSLEVTDVSLDFFKALYSDAATGTYSSSSSTYSSIVDAVKTFADGFVSIVETHAASNGSMSEQYDKLRGVILSARDLTWSYAALLTANNRRNSVVPASWGETSASSVPGTCLVTSMIGTYSSVTVTSWPSIVATGGTTTTATPTGSGSVTSTSKTTATASKTSTSTSSTSCTTPTAVAVTFDLTATTTYGENIYLVGSISQLGDWETSDGIALSADKYTSSDPLWYVTVTLPAGESFEYKFIRIESDDSVEWESDPNREYTVPQACGTSTATVTDTWRDYKDHDGDYKDHDIDYKDDDDK

SEQ ID NO: 45038 - protein, 576 aa, Artificial Sequence
  Description of Artificial Sequence: Synthetic polypeptide
ATLDSWLSNEATVARTAILNNIGADGAWVSGADSGIVVASPSTDNPDYFYTWTRDSGLVLKTLVDLFRNGDTSLLSTIENYISAQAIVQGISNPSGKLIIGRGLGEPKFNVDETAYTGSWGRPQRDGPALRATAMIGFGQWLLDNGYTSTATDIVWPLVRNDLSFWTGSFILANFDSSRSGKDANTLLGSIHTFDPEAACDDSTFQPCSPRALANHKEVVDSFRSIYTLNDGLMMVKAVAVGRYPEDTYYNGNPWFLCTLAAAEQLYDALYQWDKQGSLEVTDVSLDFFKALYSDAATGTYSSSSSTYSSIVDAVKTFADGFVSIVETHAASNGSMSEQYDKMRGLVLSARDLTWSYAALLTANNRRNSVVPASWGETSASSVPGTCVMTSIIGTYSSVTVTSWPSIVATGGTTTTATPTGSGSVTSTSKTTATASKTSTSTSSTSCTTPTAVAVTFDLTATTTYGENIYLVGSISQLGDWETSDGIALSADKYTSSDPLWYVTVTLPAGESFEYKFIRIESDDSVEWESDPNREYTVPQACGTSTATVTDTWRDYKDHDGDYKDHDIDYKDDDDK

SEQ ID NO: 45039 - protein, 638 aa, Artificial Sequence
  Description of Artificial Sequence: Synthetic polypeptide
  MOD_RES (299)..(299): Any amino acid
  MOD_RES (405)..(406): Any amino acid
  MOD_RES (409)..(409): Any amino acid
  MOD_RES (450)..(451): Any amino acid
  MOD_RES (454)..(454): Any amino acid
ATLDSWLSNEATVARTAILNNIGADGAWVSGADSGIVVASPSTDNPDYFYTWTRDSGLVLKTLVDLFRNGDTSLLSTIENYISAQAIVQGISNPSGTLTTGMGLGEPKFNVDETAYTGSWGRPQRDGPALRATAMIGFGQWLLDNGYTSTATDIVWPLVRNDLSYVAQYWNQTGYDLWEEVNGSSFFTIAVQHRALVEGSAFATAVGSSCSWCDSQAPEILCYLQSFWTGSFILANFDSSRSGKDANTLLGSIHTFDPEAACDDSTFQPCSPRALANHKEVVDSFRSIYTLNDGLKRFXAVAVGRYPEDTYYNGNPWFLCTLAAAEQLYDALYQWDKQGSLEVTDVSLDFFKALYSDAATGTYSSSSSTYSSIVDAVKTFADGFVSIVETHAASNGSMSEQYDKXXGVXLSARDLTWSYAALLTANNRRNSVVPASWGETSASSVPGTCXXTSXIGTYSSVTVTSWPSIVATGGTTTTATPTGSGSVTSTSKTTATASKTSTSTSSTSCTTPTAVAVTFDLTATTTYGENIYLVGSISQLGDWETSDGIALSADKYTSSDPLWYVTVTLPAGESFEYKFIRIESDDSVEWESDPNREYTVPQACGTSTATVTDTWRDYKDHDGDYKDHDIDYKDDDDK

SEQ ID NO: 45040 - protein, 638 aa, Artificial Sequence
  Description of Artificial Sequence: Synthetic polypeptide
ATLDSWLSNEATVARTAILNNIGADGAWVSGADSGIVVASPSTDNPDYFYTWTRDSGLVLKTLVDLFRNGDTSLLSTIENYISAQAIVQGISNPSGKLMTGTGLGEPKFNVDETAYTGSWGRPQRDGPALRATAMIGFGQWLLDNGYTSTATDIVWPLVRNDLSYVAQYWNQTGYDLWEEVNGSSFFTIAVQHRALVEGSAFATAVGSSCSWCDSQAPEILCYLQSFWTGSFILANFDSSRSGKDANTLLGSIHTFDPEAACDDSTFQPCSPRALANHKEVVDSFRSIYTLNDGLRRLRAVAVGRYPEDTYYNGNPWFLCTLAAAEQLYDALYQWDKQGSLEVTDVSLDFFKALYSDAATGTYSSSSSTYSSIVDAVKTFADGFVSIVETHAASNGSMSEQYDKLRGVILSARDLTWSYAALLTANNRRNSVVPASWGETSASSVPGTCLVTSMIGTYSSVTVTSWPSIVATGGTTTTATPTGSGSVTSTSKTTATASKTSTSTSSTSCTTPTAVAVTFDLTATTTYGENIYLVGSISQLGDWETSDGIALSADKYTSSDPLWYVTVTLPAGESFEYKFIRIESDDSVEWESDPNREYTVPQACGTSTATVTDTWRDYKDHDGDYKDHDIDYKDDDDK

SEQ ID NO: 45041 - protein, 638 aa, Artificial Sequence
  Description of Artificial Sequence: Synthetic polypeptide
ATLDSWLSNEATVARTAILNNIGADGAWVSGADSGIVVASPSTDNPDYFYTWTRDSGLVLKTLVDLFRNGDTSLLSTIENYISAQAIVQGISNPSGKLTRGIGLGEPKFNVDETAYTGSWGRPQRDGPALRATAMIGFGQWLLDNGYTSTATDIVWPLVRNDLSYVAQYWNQTGYDLWEEVNGSSFFTIAVQHRALVEGSAFATAVGSSCSWCDSQAPEILCYLQSFWTGSFILANFDSSRSGKDANTLLGSIHTFDPEAACDDSTFQPCSPRALANHKEVVDSFRSIYTLNDGLRKVTAVAVGRYPEDTYYNGNPWFLCTLAAAEQLYDALYQWDKQGSLEVTDVSLDFFKALYSDAATGTYSSSSSTYSSIVDAVKTFADGFVSIVETHAASNGSMSEQYDKFKGIFLSARDLTWSYAALLTANNRRNSVVPASWGETSASSVPGTCVFTSFIGTYSSVTVTSWPSIVATGGTTTTATPTGSGSVTSTSKTTATASKTSTSTSSTSCTTPTAVAVTFDLTATTTYGENIYLVGSISQLGDWETSDGIALSADKYTSSDPLWYVTVTLPAGESFEYKFIRIESDDSVEWESDPNREYTVPQACGTSTATVTDTWRDYKDHDGDYKDHDIDYKDDDDK

SEQ ID NO: 45042 - protein, 638 aa, Artificial Sequence
  Description of Artificial Sequence: Synthetic polypeptide
ATLDSWLSNEATVARTAILNNIGADGAWVSGADSGIVVASPSTDNPDYFYTWTRDSGLVLKTLVDLFRNGDTSLLSTIENYISAQAIVQGISNPSGRLKKGRGLGEPKFNVDETAYTGSWGRPQRDGPALRATAMIGFGQWLLDNGYTSTATDIVWPLVRNDLSYVAQYWNQTGYDLWEEVNGSSFFTIAVQHRALVEGSAFATAVGSSCSWCDSQAPEILCYLQSFWTGSFILANFDSSRSGKDANTLLGSIHTFDPEAACDDSTFQPCSPRALANHKEVVDSFRSIYTLNDGLTRVRAVAVGRYPEDTYYNGNPWFLCTLAAAEQLYDALYQWDKQGSLEVTDVSLDFFKALYSDAATGTYSSSSSTYSSIVDAVKTFADGFVSIVETHAASNGSMSEQYDKMRGLVLSARDLTWSYAALLTANNRRNSVVPASWGETSASSVPGTCVLTSVIGTYSSVTVTSWPSIVATGGTTTTATPTGSGSVTSTSKTTATASKTSTSTSSTSCTTPTAVAVTFDLTATTTYGENIYLVGSISQLGDWETSDGIALSADKYTSSDPLWYVTVTLPAGESFEYKFIRIESDDSVEWESDPNREYTVPQACGTSTATVTDTWRDYKDHDGDYKDHDIDYKDDDDK

SEQ ID NO: 45043 - protein, 638 aa, Artificial Sequence
  Description of Artificial Sequence: Synthetic polypeptide
ATLDSWLSNEATVARTAILNNIGADGAWVSGADSGIVVASPSTDNPDYFYTWTRDSGLVLKTLVDLFRNGDTSLLSTIENYISAQAIVQGISNPSGKLRTGKGLGEPKFNVDETAYTGSWGRPQRDGPALRATAMIGFGQWLLDNGYTSTATDIVWPLVRNDLSYVAQYWNQTGYDLWEEVNGSSFFTIAVQHRALVEGSAFATAVGSSCSWCDSQAPEILCYLQSFWTGSFILANFDSSRSGKDANTLLGSIHTFDPEAACDDSTFQPCSPRALANHKEVVDSFRSIYTLNDGLKIFRAVAVGRYPEDTYYNGNPWFLCTLAAAEQLYDALYQWDKQGSLEVTDVSLDFFKALYSDAATGTYSSSSSTYSSIVDAVKTFADGFVSIVETHAASNGSMSEQYDKFMGVVLSARDLTWSYAALLTANNRRNSVVPASWGETSASSVPGTCLMTSVIGTYSSVTVTSWPSIVATGGTTTTATPTGSGSVTSTSKTTATASKTSTSTSSTSCTTPTAVAVTFDLTATTTYGENIYLVGSISQLGDWETSDGIALSADKYTSSDPLWYVTVTLPAGESFEYKFIRIESDDSVEWESDPNREYTVPQACGTSTATVTDTWRDYKDHDGDYKDHDIDYKDDDDK

SEQ ID NO: 45044 - protein, 638 aa, Artificial Sequence
  Description of Artificial Sequence: Synthetic polypeptide
ATLDSWLSNEATVARTAILNNIGADGAWVSGADSGIVVASPSTDNPDYFYTWTRDSGLVLKTLVDLFRNGDTSLLSTIENYISAQAIVQGISNPSGKLKRGTGLGEPKFNVDETAYTGSWGRPQRDGPALRATAMIGFGQWLLDNGYTSTATDIVWPLVRNDLSYVAQYWNQTGYDLWEEVNGSSFFTIAVQHRALVEGSAFATAVGSSCSWCDSQAPEILCYLQSFWTGSFILANFDSSRSGKDANTLLGSIHTFDPEAACDDSTFQPCSPRALANHKEVVDSFRSIYTLNDGLTKVRAVAVGRYPEDTYYNGNPWFLCTLAAAEQLYDALYQWDKQGSLEVTDVSLDFFKALYSDAATGTYSSSSSTYSSIVDAVKTFADGFVSIVETHAASNGSMSEQYDKVKGFMLSARDLTWSYAALLTANNRRNSVVPASWGETSASSVPGTCVLTSVIGTYSSVTVTSWPSIVATGGTTTTATPTGSGSVTSTSKTTATASKTSTSTSSTSCTTPTAVAVTFDLTATTTYGENIYLVGSISQLGDWETSDGIALSADKYTSSDPLWYVTVTLPAGESFEYKFIRIESDDSVEWESDPNREYTVPQACGTSTATVTDTWRDYKDHDGDYKDHDIDYKDDDDK

SEQ ID NO: 45045 - protein, 638 aa, Artificial Sequence
  Description of Artificial Sequence: Synthetic polypeptide
ATLDSWLSNEATVARTAILNNIGADGAWVSGADSGIVVASPSTDNPDYFYTWTRDSGLVLKTLVDLFRNGDTSLLSTIENYISAQAIVQGISNPSGRLMMGKGLGEPKFNVDETAYTGSWGRPQRDGPALRATAMIGFGQWLLDNGYTSTATDIVWPLVRNDLSYVAQYWNQTGYDLWEEVNGSSFFTIAVQHRALVEGSAFATAVGSSCSWCDSQAPEILCYLQSFWTGSFILANFDSSRSGKDANTLLGSIHTFDPEAACDDSTFQPCSPRALANHKEVVDSFRSIYTLNDGLKKIRAVAVGRYPEDTYYNGNPWFLCTLAAAEQLYDALYQWDKQGSLEVTDVSLDFFKALYSDAATGTYSSSSSTYSSIVDAVKTFADGFVSIVETHAASNGSMSEQYDKLKGMMLSARDLTWSYAALLTANNRRNSVVPASWGETSASSVPGTCVITSLIGTYSSVTVTSWPSIVATGGTTTTATPTGSGSVTSTSKTTATASKTSTSTSSTSCTTPTAVAVTFDLTATTTYGENIYLVGSISQLGDWETSDGIALSADKYTSSDPLWYVTVTLPAGESFEYKFIRIESDDSVEWESDPNREYTVPQACGTSTATVTDTWRDYKDHDGDYKDHDIDYKDDDDK

SEQ ID NO: 45046 - protein, 638 aa, Artificial Sequence
  Description of Artificial Sequence: Synthetic polypeptide
ATLDSWLSNEATVARTAILNNIGADGAWVSGADSGIVVASPSTDNPDYFYTWTRDSGLVLKTLVDLFRNGDTSLLSTIENYISAQAIVQGISNPSGRLKTGRGLGEPKFNVDETAYTGSWGRPQRDGPALRATAMIGFGQWLLDNGYTSTATDIVWPLVRNDLSYVAQYWNQTGYDLWEEVNGSSFFTIAVQHRALVEGSAFATAVGSSCSWCDSQAPEILCYLQSFWTGSFILANFDSSRSGKDANTLLGSIHTFDPEAACDDSTFQPCSPRALANHKEVVDSFRSIYTLNDGLTKITAVAVGRYPEDTYYNGNPWFLCTLAAAEQLYDALYQWDKQGSLEVTDVSLDFFKALYSDAATGTYSSSSSTYSSIVDAVKTFADGFVSIVETHAASNGSMSEQYDKLRGVVLSARDLTWSYAALLTANNRRNSVVPASWGETSASSVPGTCLITSVIGTYSSVTVTSWPSIVATGGTTTTATPTGSGSVTSTSKTTATASKTSTSTSSTSCTTPTAVAVTFDLTATTTYGENIYLVGSISQLGDWETSDGIALSADKYTSSDPLWYVTVTLPAGESFEYKFIRIESDDSVEWESDPNREYTVPQACGTSTATVTDTWRDYKDHDGDYKDHDIDYKDDDDK

SEQ ID NO: 45047 - protein, 638 aa, Artificial Sequence
  Description of Artificial Sequence: Synthetic polypeptide
ATLDSWLSNEATVARTAILNNIGADGAWVSGADSGIVVASPSTDNPDYFYTWTRDSGLVLKTLVDLFRNGDTSLLSTIENYISAQAIVQGISNPSGTLRRGTGLGEPKFNVDETAYTGSWGRPQRDGPALRATAMIGFGQWLLDNGYTSTATDIVWPLVRNDLSYVAQYWNQTGYDLWEEVNGSSFFTIAVQHRALVEGSAFATAVGSSCSWCDSQAPEILCYLQSFWTGSFILANFDSSRSGKDANTLLGSIHTFDPEAACDDSTFQPCSPRALANHKEVVDSFRSIYTLNDGLRMMTAVAVGRYPEDTYYNGNPWFLCTLAAAEQLYDALYQWDKQGSLEVTDVSLDFFKALYSDAATGTYSSSSSTYSSIVDAVKTFADGFVSIVETHAASNGSMSEQYDKLTGLFLSARDLTWSYAALLTANNRRNSVVPASWGETSASSVPGTCLLTSLIGTYSSVTVTSWPSIVATGGTTTTATPTGSGSVTSTSKTTATASKTSTSTSSTSCTTPTAVAVTFDLTATTTYGENIYLVGSISQLGDWETSDGIALSADKYTSSDPLWYVTVTLPAGESFEYKFIRIESDDSVEWESDPNREYTVPQACGTSTATVTDTWRDYKDHDGDYKDHDIDYKDDDDK

SEQ ID NO: 45048 - protein, 543 aa, Artificial Sequence
  Description of Artificial Sequence: Synthetic polypeptide
ATLDSWLSNEATVARTAILNNIGADGSWGRPQRDGPALRATAMIGFGQWLLDNGYTSTATDIVWPLVRNDLSYVAQYWNQTGYDLWEEVNGSSFFTIAVQHRALVEGSAFATAVGSSCSWCDSQAPEILCYLQSFWTGSFILANFDSSRSGKDANTLLGSIHTFDPEAACDDSTFQPCSPRALANHKEVVDSFRSIYTLNDGLTKVRAVAVGRYPEDTYYNGNPWFLCTLAAAEQLYDALYQWDKQGSLEVTDVSLDFFKALYSDAATGTYSSSSSTYSSIVDAVKTFADGFVSIVETHAASNGSMSEQYDKWFLSARDLTWSYAALLTANNRRNSVVPASWGETSASSVPGTCVITSLIGTYSSVTVTSWPSIVATGGTTTTATPTGSGSVTSTSKTTATASKTSTSTSSTSCTTPTAVAVTFDLTATTTYGENIYLVGSISQLGDWETSDGIALSADKYTSSDPLWYVTVTLPAGESFEYKFIRIESDDSVEWESDPNREYTVPQACGTSTATVTDTWRDYKDHDGDYKDHDIDYKDDDDK

SEQ ID NO: 45049 - protein, 97 aa, Artificial Sequence
  Description of Artificial Sequence: Synthetic polypeptide
ATLDSWLSNEATVARTAILNNIGADGAWVSGADSGIVVASPSTDNPDYFYTWTRDSGLVLKTLVDLFRNGDTSLLSTIENYISAQAIVQGISNPSGN

SEQ ID NO: 45050 - protein, 638 aa, Artificial Sequence
  Description of Artificial Sequence: Synthetic polypeptide
  MOD_RES (406)..(406): Any amino acid
  MOD_RES (408)..(408): Any amino acid
  MOD_RES (451)..(451): Any amino acid
  MOD_RES (454)..(454): Any amino acid
ATLDSWLSNEATVARTAILNNIGADGAWVSGADSGIVVASPSTDNPDYFYTWTRDSGLVLKTLVDLFRNGDTSLLSTIENYISAQAIVQGISNPSGRLKKGKGLGEPKFNVDETAYTGSWGRPQRDGPALRATAMIGFGQWLLDNGYTSTATDIVWPLVRNDLSYVAQYWNQTGYDLWEEVNGSSFFTIAVQHRALVEGSAFATAVGSSCSWCDSQAPEILCYLQSFWTGSFILANFDSSRSGKDANTLLGSIHTFDPEAACDDSTFQPCSPRALANHKEVVDSFRSIYTLNDGLMKITAVAVGRYPEDTYYNGNPWFLCTLAAAEQLYDALYQWDKQGSLEVTDVSLDFFKALYSDAATGTYSSSSSTYSSIVDAVKTFADGFVSIVETHAASNGSMSEQYDKLXGXMLSARDLTWSYAALLTANNRRNSVVPASWGETSASSVPGTCLXTSXIGTYSSVTVTSWPSIVATGGTTTTATPTGSGSVTSTSKTTATASKTSTSTSSTSCTTPTAVAVTFDLTATTTYGENIYLVGSISQLGDWETSDGIALSADKYTSSDPLWYVTVTLPAGESFEYKFIRIESDDSVEWESDPNREYTVPQACGTSTATVTDTWRDYKDHDGDYKDHDIDYKDDDDK

SEQ ID NO: 45051 - protein, 638 aa, Artificial Sequence
  Description of Artificial Sequence: Synthetic polypeptide
ATLDSWLSNEATVARTAILNNIGADGAWVSGADSGIVVASPSTDNPDYFYTWTRDSGLVLKTLVDLFRNGDTSLLSTIENYISAQAIVQGISNPSGKLKKGIGLGEPKFNVDETAYTGSWGRPQRDGPALRATAMIGFGQWLLDNGYTSTATDIVWPLVRNDLSYVAQYWNQTGYDLWEEVNGSSFFTIAVQHRALVEGSAFATAVGSSCSWCDSQAPEILCYLQSFWTGSFILANFDSSRSGKDANTLLGSIHTFDPEAACDDSTFQPCSPRALANHKEVVDSFRSIYTLNDGLSDSEAVAVGRYPEDTYYNGNPWFLCTLAAAEQLYDALYQWDKQGSLEVTDVSLDFFKALYSDAATGTYSSSSSTYSSIVDAVKTFADGFVSIVETHAASNGSMSEQYDKSDGEQLSARDLTWSYAALLTANNRRNSVVPASWGETSASSVPGTCAATSAIGTYSSVTVTSWPSIVATGGTTTTATPTGSGSVTSTSKTTATASKTSTSTSSTSCTTPTAVAVTFDLTATTTYGENIYLVGSISQLGDWETSDGIALSADKYTSSDPLWYVTVTLPAGESFEYKFIRIESDDSVEWESDPNREYTVPQACGTSTATVTDTWRDYKDHDGDYKDHDIDYKDDDDK

SEQ ID NO: 45052 - protein, 638 aa, Artificial Sequence
  Description of Artificial Sequence: Synthetic polypeptide
ATLDSWLSNEATVARTAILNNIGADGAWVSGADSGIVVASPSTDNPDYFYTWTRDSGLVLKTLVDLFRNGDTSLLSTIENYISAQAIVQGISNPSGKLKKGKGLGEPKFNVDETAYTGSWGRPQRDGPALRATAMIGFGQWLLDNGYTSTATDIVWPLVRNDLSYVAQYWNQTGYDLWEEVNGSSFFTIAVQHRALVEGSAFATAVGSSCSWCDSQAPEILCYLQSFWTGSFILANFDSSRSGKDANTLLGSIHTFDPEAACDDSTFQPCSPRALANHKEVVDSFRSIYTLNDGLKKKKAVAVGRYPEDTYYNGNPWFLCTLAAAEQLYDALYQWDKQGSLEVTDVSLDFFKALYSDAATGTYSSSSSTYSSIVDAVKTFADGFVSIVETHAASNGSMSEQYDKKKGKKLSARDLTWSYAALLTANNRRNSVVPASWGETSASSVPGTCKKTSKIGTYSSVTVTSWPSIVATGGTTTTATPTGSGSVTSTSKTTATASKTSTSTSSTSCTTPTAVAVTFDLTATTTYGENIYLVGSISQLGDWETSDGIALSADKYTSSDPLWYVTVTLPAGESFEYKFIRIESDDSVEWESDPNREYTVPQACGTSTATVTDTWRDYKDHDGDYKDHDIDYKDDDDK

SEQ ID NO: 45053 - DNA, 70 bp, Artificial Sequence
  Description of Artificial Sequence: Synthetic primer
  modified_base (26)..(26): a, c, t, g, unknown or other
  modified_base (28)..(29): a, c, t, g, unknown or other
  modified_base (31)..(31): a, c, t, g, unknown or other
  modified_base (35)..(35): a, c, t, g, unknown or other
  modified_base (37)..(38): a, c, t, g, unknown or other
  modified_base (40)..(40): a, c, t, g, unknown or other
ggtcatcaatcataccaccagtgatntnntnggcntnntntccaatgaggttaagagtattccaaactgg

SEQ ID NO: 45054 - DNA, 62 bp, Artificial Sequence
  Description of Artificial Sequence: Synthetic primer
  modified_base (27)..(27): a, c, t, g, unknown or other
  modified_base (29)..(29): a, c, t, g, unknown or other
  modified_base (31)..(32): a, c, t, g, unknown or other
  modified_base (34)..(34): a, c, t, g, unknown or other
  modified_base (36)..(36): a, c, t, g, unknown or other
cagtcaattttggccgaatatcacaanrntnntnanrgagttccaatacggagaaatcctgc

SEQ ID NO: 45055 - DNA, 66 bp, Artificial Sequence
  Description of Artificial Sequence: Synthetic primer
  modified_base (26)..(26): a, c, t, g, unknown or other
  modified_base (28)..(28): a, c, t, g, unknown or other
  modified_base (30)..(30): a, c, t, g, unknown or other
  modified_base (35)..(35): a, c, t, g, unknown or other
  modified_base (37)..(38): a, c, t, g, unknown or other
  modified_base (40)..(40): a, c, t, g, unknown or other
  modified_base (42)..(42): a, c, t, g, unknown or other
tcgtaatctgggcgtgtcgaatatcntnanrtatntnntnanrgtgtctgcggacaagctagtgac

SEQ ID NO: 45056 - DNA, 56 bp, Artificial Sequence
  Description of Artificial Sequence: Synthetic primer
  modified_base (24)..(24): a, c, t, g, unknown or other
  modified_base (26)..(26): a, c, t, g, unknown or other
  modified_base (31)..(31): a, c, t, g, unknown or other
  modified_base (34)..(34): a, c, t, g, unknown or other
gatttcacaatgtgatggctggantncctanranrctctcgaacccgaatggaaac

SEQ ID NO: 45057 - DNA, 23 bp, Artificial Sequence
  Description of Artificial Sequence: Synthetic primer
ggtcatcaatcataccaccagtg

SEQ ID NO: 45058 - DNA, 24 bp, Artificial Sequence
  Description of Artificial Sequence: Synthetic primer
cagtcaattttggccgaatatcac

SEQ ID NO: 45059 - DNA, 19 bp, Artificial Sequence
  Description of Artificial Sequence: Synthetic primer
tcgtaatctgggcgtgtcg

SEQ ID NO: 45060 - DNA, 22 bp, Artificial Sequence
  Description of Artificial Sequence: Synthetic primer
gatttcacaatgtgatggctgg

SEQ ID NO: 45061 - DNA, 25 bp, Artificial Sequence
  Description of Artificial Sequence: Synthetic primer
tgtgatattcggccaaaattgactg

SEQ ID NO: 45062 - DNA, 24 bp, Artificial Sequence
  Description of Artificial Sequence: Synthetic primer
gatattcgacacgcccagattacg

SEQ ID NO: 45063 - DNA, 23 bp, Artificial Sequence
  Description of Artificial Sequence: Synthetic primer
tccagccatcacattgtgaaatc

SEQ ID NO: 45064 - DNA, 24 bp, Artificial Sequence
  Description of Artificial Sequence: Synthetic primer
atctgcacgcaaggtaatcgtcag

SEQ ID NO: 45065 - DNA, 22 bp, Artificial Sequence
  Description of Artificial Sequence: Synthetic primer
ctgacgattaccttgcgtgcag

SEQ ID NO: 45066 - DNA, 23 bp, Artificial Sequence
  Description of Artificial Sequence: Synthetic primer
cactggtggtatgattgatgacc

SEQ ID NO: 45067 - DNA, 70 bp, Artificial Sequence
  Description of Artificial Sequence: Synthetic primer
ggtcatcaatcataccaccagtgatcttctgggccttctgtccaatgaggttaagagtattccaaactgg

SEQ ID NO: 45068 - DNA, 70 bp, Artificial Sequence
  Description of Artificial Sequence: Synthetic primer
ggtcatcaatcataccaccagtgatattatcggcattatctccaatgaggttaagagtattccaaactgg

SEQ ID NO: 45069 - DNA, 70 bp, Artificial Sequence
  Description of Artificial Sequence: Synthetic primer
ggtcatcaatcataccaccagtgatgttgtgggcgttgtgtccaatgaggttaagagtattccaaactgg

SEQ ID NO: 45070 - DNA, 70 bp, Artificial Sequence
  Description of Artificial Sequence: Synthetic primer
ggtcatcaatcataccaccagtgattttttcggctttttctccaatgaggttaagagtattccaaactgg

SEQ ID NO: 45071 - DNA, 70 bp, Artificial Sequence
  Description of Artificial Sequence: Synthetic primer
ggtcatcaatcataccaccagtgattggtggggatggtggtccaatgaggttaagagtattccaaactgg

SEQ ID NO: 45072 - DNA, 70 bp, Artificial Sequence
  Description of Artificial Sequence: Synthetic primer
ggtcatcaatcataccaccagtgatatgatgggcatgatgtccaatgaggttaagagtattccaaactgg

SEQ ID NO: 45073 - DNA, 70 bp, Artificial Sequence
  Description of Artificial Sequence: Synthetic primer
ggtcatcaatcataccaccagtgatacaacgggcacaacgtccaatgaggttaagagtattccaaactgg

SEQ ID NO: 45074 - DNA, 70 bp, Artificial Sequence
  Description of Artificial Sequence: Synthetic primer
ggtcatcaatcataccaccagtgattataagaaaggcaagaaaaatgaggttaagagtattccaaactgg

SEQ ID NO: 45075 - DNA, 70 bp, Artificial Sequence
  Description of Artificial Sequence: Synthetic primer
ggtcatcaatcataccaccagtgattatcatcatggccatcacaatgaggttaagagtattccaaactgg

SEQ ID NO: 45076 - DNA, 62 bp, Artificial Sequence
  Description of Artificial Sequence: Synthetic primer
cagtcaattttggccgaatatcacaaagcttctgggcgagttccaatacggagaaatcctgc

SEQ ID NO: 45077 - DNA, 62 bp, Artificial Sequence
  Description of Artificial Sequence: Synthetic primer
cagtcaattttggccgaatatcacaaagattatcggcgagttccaatacggagaaatcctgc

SEQ ID NO: 45078 - DNA, 62 bp, Artificial Sequence
  Description of Artificial Sequence: Synthetic primer
cagtcaattttggccgaatatcacaaaggttgtgggcgagttccaatacggagaaatcctgc

SEQ ID NO: 45079 - DNA, 62 bp, Artificial Sequence
  Description of Artificial Sequence: Synthetic primer
cagtcaattttggccgaatatcacaaagttctttggcgagttccaatacggagaaatcctgc

SEQ ID NO: 45080 - DNA, 62 bp, Artificial Sequence
  Description of Artificial Sequence: Synthetic primer
cagtcaattttggccgaatatcacaaagtggtggggcgagttccaatacggagaaatcctgc

SEQ ID NO: 45081 - DNA, 62 bp, Artificial Sequence
  Description of Artificial Sequence: Synthetic primer
cagtcaattttggccgaatatcacaaagatgatgggcgagttccaatacggagaaatcctgc

SEQ ID NO: 45082 - DNA, 62 bp, Artificial Sequence
  Description of Artificial Sequence: Synthetic primer
cagtcaattttggccgaatatcacaaagacgacaggcgagttccaatacggagaaatcctgc

SEQ ID NO: 45083 - DNA, 62 bp, Artificial Sequence
  Description of Artificial Sequence: Synthetic primer
cagtcaattttggccgaatatcacaaagaaaggagcagagttccaatacggagaaatcctgc

SEQ ID NO: 45084 - DNA, 62 bp, Artificial Sequence
  Description of Artificial Sequence: Synthetic primer
cagtcaattttggccgaatatcacacatcatggagcagagttccaatacggagaaatcctgc

SEQ ID NO: 45085 - DNA, 66 bp, Artificial Sequence
  Description of Artificial Sequence: Synthetic primer
tcgtaatctgggcgtgtcgaatatccttcactatcttctggatgtgtctgcggacaagctagtgac

SEQ ID NO: 45086 - DNA, 66 bp, Artificial Sequence
  Description of Artificial Sequence: Synthetic primer
tcgtaatctgggcgtgtcgaatatcattcactatatcattgatgtgtctgcggacaagctagtgac

SEQ ID NO: 45087 - DNA, 66 bp, Artificial Sequence
  Description of Artificial Sequence: Synthetic primer
tcgtaatctgggcgtgtcgaatatcgttcactatgttgtggatgtgtctgcggacaagctagtgac

SEQ ID NO: 45088 - DNA, 66 bp, Artificial Sequence
  Description of Artificial Sequence: Synthetic primer
tcgtaatctgggcgtgtcgaatatcttccactatttctttgatgtgtctgcggacaagctagtgac

SEQ ID NO: 45089 - DNA, 66 bp, Artificial Sequence
  Description of Artificial Sequence: Synthetic primer
tcgtaatctgggcgtgtcgaatatctggcactattggtgggatgtgtctgcggacaagctagtgac

SEQ ID NO: 45090 - DNA, 66 bp, Artificial Sequence
  Description of Artificial Sequence: Synthetic primer
tcgtaatctgggcgtgtcgaatatcatgcactatatgatggatgtgtctgcggacaagctagtgac

SEQ ID NO: 45091 - DNA, 66 bp, Artificial Sequence
  Description of Artificial Sequence: Synthetic primer
tcgtaatctgggcgtgtcgaatatcacacactatacaacggatgtgtctgcggacaagctagtgac

SEQ ID NO: 45092 - DNA, 66 bp, Artificial Sequence
  Description of Artificial Sequence: Synthetic primer
tcgtaatctgggcgtgtcgaatatctccaagtataaagcaaaggtgtctgcggacaagctagtgac

SEQ ID NO: 45093 - DNA, 66 bp, Artificial Sequence
  Description of Artificial Sequence: Synthetic primer
tcgtaatctgggcgtgtcgaatatctcccattatcacgcacatgtgtctgcggacaagctagtgac

SEQ ID NO: 45094 - DNA, 56 bp, Artificial Sequence
  Description of Artificial Sequence: Synthetic primer
gatttcacaatgtgatggctggacttcctgaggaactctcgaacccgaatggaaac

SEQ ID NO: 45095 - DNA, 56 bp, Artificial Sequence
  Description of Artificial Sequence: Synthetic primer
gatttcacaatgtgatggctggaattcctgaggaactctcgaacccgaatggaaac

SEQ ID NO: 45096 - DNA, 56 bp, Artificial Sequence
  Description of Artificial Sequence: Synthetic primer
gatttcacaatgtgatggctggagttcctgaggaactctcgaacccgaatggaaac

SEQ ID NO: 45097 - DNA, 56 bp, Artificial Sequence
  Description of Artificial Sequence: Synthetic primer
gatttcacaatgtgatggctggattccctgaggaactctcgaacccgaatggaaac

SEQ ID NO: 45098 - DNA, 56 bp, Artificial Sequence
  Description of Artificial Sequence: Synthetic primer
gatttcacaatgtgatggctggatggcctgaggaactctcgaacccgaatggaaac

SEQ ID NO: 45099 - DNA, 56 bp, Artificial Sequence
  Description of Artificial Sequence: Synthetic primer
gatttcacaatgtgatggctggaatgcctgaggaactctcgaacccgaatggaaac

SEQ ID NO: 45100 - DNA, 56 bp, Artificial Sequence
  Description of Artificial Sequence: Synthetic primer
gatttcacaatgtgatggctggaacacctgaggaactctcgaacccgaatggaaac

SEQ ID NO: 45101 - DNA, 56 bp, Artificial Sequence
  Description of Artificial Sequence: Synthetic primer
gatttcacaatgtgatggctggaaagcctgaggaactctcgaacccgaatggaaac

SEQ ID NO: 45102 - DNA, 56 bp, Artificial Sequence
  Description of Artificial Sequence: Synthetic primer
gatttcacaatgtgatggctggacatcctgaggaactctcgaacccgaatggaaac

SEQ ID NO: 45103 - DNA, 22 bp, Artificial Sequence
  Description of Artificial Sequence: Synthetic primer
cttgaaattggaagggagattc

SEQ ID NO: 45104 - DNA, 23 bp, Artificial Sequence
  Description of Artificial Sequence: Synthetic primer
gtataaacttttcagttgcagac

SEQ ID NO: 45105 - DNA, 64 bp, Artificial Sequence
  Description of Artificial Sequence: Synthetic primer
  modified_base (27)..(27): a, c, t, g, unknown or other
  modified_base (33)..(33): a, c, t, g, unknown or other
  modified_base (36)..(36): a, c, t, g, unknown or other
  modified_base (42)..(42): a, c, t, g, unknown or other
ccagggtatcagtaacccctctggtanrctganranrggcanrggtctcggtgaacccaagttc

SEQ ID NO: 45106 - DNA, 58 bp, Artificial Sequence
  Description of Artificial Sequence: Synthetic primer
  modified_base (30)..(30): a, c, t, g, unknown or other
  modified_base (33)..(33): a, c, t, g, unknown or other
  modified_base (35)..(35): a, c, t, g, unknown or other
  modified_base (37)..(37): a, c, t, g, unknown or other
  modified_base (39)..(39): a, c, t, g, unknown or other
ctcaatctataccctcaacgatggtctcanranrntnanrgctgttgcggtgggtcgg

SEQ ID NO: 45107 - DNA, 58 bp, Artificial Sequence
  Description of Artificial Sequence: Synthetic primer
  modified_base (26)..(26): a, c, t, g, unknown or other
  modified_base (28)..(28): a, c, t, g, unknown or other
  modified_base (30)..(30): a, c, t, g, unknown or other
  modified_base (35)..(35): a, c, t, g, unknown or other
  modified_base (37)..(38): a, c, t, g, unknown or other
  modified_base (40)..(40): a, c, t, g, unknown or other
ctccatgtccgagcaatacgacaagntnanrggcntnntnctttccgctcgcgacctg

SEQ ID NO: 45108 - DNA, 69 bp, Artificial Sequence
  Description of Artificial Sequence: Synthetic primer
  modified_base (26)..(26): a, c, t, g, unknown or other
  modified_base (28)..(29): a, c, t, g, unknown or other
  modified_base (31)..(31): a, c, t, g, unknown or other
  modified_base (38)..(38): a, c, t, g, unknown or other
  modified_base (40)..(40): a, c, t, g, unknown or other
tgccagcagcgtgcccggcacctgtntnntnacatctntnattggtacctacagcagtgtgactgtcac

SEQ ID NO: 45109 - DNA, 24 bp, Artificial Sequence
  Description of Artificial Sequence: Synthetic primer
ccagggtatcagtaacccctctgg

SEQ ID NO: 45110 - DNA, 28 bp, Artificial Sequence
  Description of Artificial Sequence: Synthetic primer
ctcaatctataccctcaacgatggtctc

SEQ ID NO: 45111 - DNA, 22 bp, Artificial Sequence
  Description of Artificial Sequence: Synthetic primer
ctccatgtccgagcaatacgac

SEQ ID NO: 45112 - DNA, 17 bp, Artificial Sequence
  Description of Artificial Sequence: Synthetic primer
tgccagcagcgtgcccg

SEQ ID NO: 45113 - DNA, 28 bp, Artificial Sequence
  Description of Artificial Sequence: Synthetic primer
gagaccatcgttgagggtatagattgag

SEQ ID NO: 45114 - DNA, 23 bp, Artificial Sequence
  Description of Artificial Sequence: Synthetic primer
cttgtcgtattgctcggacatgg

SEQ ID NO: 45115 - DNA, 17 bp, Artificial Sequence
  Description of Artificial Sequence: Synthetic primer
acaggtgccgggcacgc

SEQ ID NO: 45116 - DNA, 25 bp, Artificial Sequence
  Description of Artificial Sequence: Synthetic primer
gatcgatccgaccaggtagatgttc

SEQ ID NO: 45117 - DNA, 25 bp, Artificial Sequence
  Description of Artificial Sequence: Synthetic primer
gaacatctacctggtcggatcgatc

SEQ ID NO: 45118 - DNA, 24 bp, Artificial Sequence
  Description of Artificial Sequence: Synthetic primer
accagaggggttactgataccctg

SEQ ID NO: 45119 - DNA, 64 bp, Artificial Sequence
  Description of Artificial Sequence: Synthetic primer
ccagggtatcagtaacccctctggtctcctgctcctgggcctcggtctcggtgaacccaagttc

SEQ ID NO: 45120 - DNA, 64 bp, Artificial Sequence
  Description of Artificial Sequence: Synthetic primer
ccagggtatcagtaacccctctggtatcctgattatcggcattggtctcggtgaacccaagttc

SEQ ID NO: 45121 - DNA, 64 bp, Artificial Sequence
  Description of Artificial Sequence: Synthetic primer
ccagggtatcagtaacccctctggtgtcctggtggtcggcgtgggtctcggtgaacccaagttc

SEQ ID NO: 45122 - DNA, 64 bp, Artificial Sequence
  Description of Artificial Sequence: Synthetic primer
ccagggtatcagtaacccctctggtttcctgttcttcggcttcggtctcggtgaacccaagttc

SEQ ID NO: 45123 - DNA, 64 bp, Artificial Sequence
  Description of Artificial Sequence: Synthetic primer
ccagggtatcagtaacccctctggttggctgtggtggggctggggtctcggtgaacccaagttc

SEQ ID NO: 45124 - DNA, 64 bp, Artificial Sequence
  Description of Artificial Sequence: Synthetic primer
ccagggtatcagtaacccctctggtatgctgatgatgggcatgggtctcggtgaacccaagttc

SEQ ID NO: 45125 - DNA, 64 bp, Artificial Sequence
  Description of Artificial Sequence: Synthetic primer
ccagggtatcagtaacccctctggtaccctgactaccggcactggtctcggtgaacccaagttc

SEQ ID NO: 45126 - DNA, 64 bp, Artificial Sequence
  Description of Artificial Sequence: Synthetic primer
ccagggtatcagtaacccctctggtaagctgaagaagggcaagggtctcggtgaacccaagttc

SEQ ID NO: 45127 - DNA, 64 bp, Artificial Sequence
  Description of Artificial Sequence: Synthetic primer
ccagggtatcagtaacccctctggtcacctgcaccacggccacggtctcggtgaacccaagttc

SEQ ID NO: 45128 - DNA, 58 bp, Artificial Sequence
  Description of Artificial Sequence: Synthetic primer
ctcaatctataccctcaacgatggtctcctcctgctcctggctgttgcggtgggtcgg

SEQ ID NO: 45129 - DNA, 58 bp, Artificial Sequence
  Description of Artificial Sequence: Synthetic primer
ctcaatctataccctcaacgatggtctcatcattatcattgctgttgcggtgggtcgg

SEQ ID NO: 45130 - DNA, 58 bp, Artificial Sequence
  Description of Artificial Sequence: Synthetic primer
ctcaatctataccctcaacgatggtctcgtcgtggtcgtggctgttgcggtgggtcgg

SEQ ID NO: 45131 - DNA, 58 bp, Artificial Sequence
  Description of Artificial Sequence: Synthetic primer
ctcaatctataccctcaacgatggtctcttcttcttcttcgctgttgcggtgggtcgg

SEQ ID NO: 45132 - DNA, 58 bp, Artificial Sequence
  Description of Artificial Sequence: Synthetic primer
ctcaatctataccctcaacgatggtctctggtggtggtgggctgttgcggtgggtcgg

SEQ ID NO: 45133 - DNA, 58 bp, Artificial Sequence
  Description of Artificial Sequence: Synthetic primer
ctcaatctataccctcaacgatggtctcatgatgatgatggctgttgcggtgggtcgg

SEQ ID NO: 45134 - DNA, 58 bp, Artificial Sequence
  Description of Artificial Sequence: Synthetic primer
ctcaatctataccctcaacgatggtctcaccactaccactgctgttgcggtgggtcgg

SEQ ID NO: 45135 - DNA, 58 bp, Artificial Sequence
  Description of Artificial Sequence: Synthetic primer
ctcaatctataccctcaacgatggtctcaagaagaagaaggctgttgcggtgggtcgg

SEQ ID NO: 45136 - DNA, 58 bp, Artificial Sequence
  Description of Artificial Sequence: Synthetic primer
ctcaatctataccctcaacgatggtctccaccaccaccacgctgttgcggtgggtcgg

SEQ ID NO: 45137 - DNA, 58 bp, Artificial Sequence
  Description of Artificial Sequence: Synthetic primer
ctccatgtccgagcaatacgacaagctcctgggcctcctgctttccgctcgcgacctg

SEQ ID NO: 45138 - DNA, 58 bp, Artificial Sequence
  Description of Artificial Sequence: Synthetic primer
ctccatgtccgagcaatacgacaagatcattggcatcattctttccgctcgcgacctg

SEQ ID NO: 45139 - DNA, 58 bp, Artificial Sequence
  Description of Artificial Sequence: Synthetic primer
ctccatgtccgagcaatacgacaaggtcgtgggcgtcgtgctttccgctcgcgacctg

SEQ ID NO: 45140 - DNA, 58 bp, Artificial Sequence
  Description of Artificial Sequence: Synthetic primer
ctccatgtccgagcaatacgacaagttcttcggcttcttcctttccgctcgcgacctg

SEQ ID NO: 45141 - DNA, 58 bp, Artificial Sequence
  Description of Artificial Sequence: Synthetic primer
ctccatgtccgagcaatacgacaagtggtggggctggtggctttccgctcgcgacctg

SEQ ID NO: 45142 - DNA, 58 bp, Artificial Sequence
  Description of Artificial Sequence: Synthetic primer
ctccatgtccgagcaatacgacaagatgatgggcatgatgctttccgctcgcgacctg

SEQ ID NO: 45143 - DNA, 58 bp, Artificial Sequence
  Description of Artificial Sequence: Synthetic primer
ctccatgtccgagcaatacgacaagaccactggcaccactctttccgctcgcgacctg

SEQ ID NO: 45144 - DNA, 58 bp, Artificial Sequence
  Description of Artificial Sequence: Synthetic primer
ctccatgtccgagcaatacgacaagaagaagggcaagaagctttccgctcgcgacctg

SEQ ID NO: 45145 - DNA, 58 bp, Artificial Sequence
  Description of Artificial Sequence: Synthetic primer
ctccatgtccgagcaatacgacaagcaccacggccaccacctttccgctcgcgacctg

SEQ ID NO: 45146 - DNA, 69 bp, Artificial Sequence
  Description of Artificial Sequence: Synthetic primer
tgccagcagcgtgcccggcacctgtctcctgacatctctcattggtacctacagcagtgtgactgtcac

SEQ ID NO: 45147 - DNA, 69 bp, Artificial Sequence
  Description of Artificial Sequence: Synthetic primer
tgccagcagcgtgcccggcacctgtatcattacatctatcattggtacctacagcagtgtgactgtcac

SEQ ID NO: 45148 - DNA, 69 bp, Artificial Sequence
  Description of Artificial Sequence: Synthetic primer
tgccagcagcgtgcccggcacctgtgtcgtgacatctgtcattggtacctacagcagtgtgactgtcac

SEQ ID NO: 45149 - DNA, 69 bp, Artificial Sequence
  Description of Artificial Sequence: Synthetic primer
tgccagcagcgtgcccggcacctgtttcttcacatctttcattggtacctacagcagtgtgactgtcac

SEQ ID NO: 45150 - DNA, 69 bp, Artificial Sequence
  Description of Artificial Sequence: Synthetic primer
tgccagcagcgtgcccggcacctgttggtggacatcttggattggtacctacagcagtgtgactgtcac

SEQ ID NO: 45151 - DNA, 69 bp, Artificial Sequence
  Description of Artificial Sequence: Synthetic primer
tgccagcagcgtgcccggcacctgtatgatgacatctatgattggtacctacagcagtgtgactgtcac

SEQ ID NO: 45152 - DNA, 69 bp, Artificial Sequence
  Description of Artificial Sequence: Synthetic primer
tgccagcagcgtgcccggcacctgtaccactacatctaccattggtacctacagcagtgtgactgtcac

SEQ ID NO: 45153 - DNA, 69 bp, Artificial Sequence
  Description of Artificial Sequence: Synthetic primer
tgccagcagcgtgcccggcacctgtaagaagacatctaagattggtacctacagcagtgtgactgtcac

SEQ ID NO: 45154 - DNA, 69 bp, Artificial Sequence
  Description of Artificial Sequence: Synthetic primer
tgccagcagcgtgcccggcacctgtcaccacacatctcacattggtacctacagcagtgtgactgtcac

SEQ ID NO: 45155 - DNA, 18 bp, Artificial Sequence
  Description of Artificial Sequence: Synthetic primer
gagagcctgagcttcatc

SEQ ID NO: 45156 - DNA, 25 bp, Artificial Sequence
  Description of Artificial Sequence: Synthetic primer
caccaacgatcttatatccagattc

SEQ ID NO: 45157 - DNA, 16 bp, Artificial Sequence
  Description of Artificial Sequence: Synthetic primer
agcagagctaacccgc
